(19) United States
(12) Patent Application Publication
(10) Pub. No.: US 2008/0293070 A1
(43) Pub. Date: Nov. 27, 2008

(54) Markers for Memory T Cells and Uses Thereof

(76) Inventors: Rafick-Pierre Sekaly, Saint-Laurent (CA); Elias Haddad, Saint-Laurent (CA); Catherine Riou, Montreal (CA)

Correspondence Address: WELLS ST. JOHN P.S., 601 W. FIRST AVENUE, SUITE 1300, SPOKANE, WA, 99201, US

(21) Appl. No.: 12/158,201

(22) PCT Filed: Dec. 21, 2006
(86) PCT No.: PCT/CA2006/002103

§ 371 Date: Jun. 19, 2008

Related U.S. Application Data
(60) Provisional application No. 60/752,042, filed on Dec. 21, 2005.

(51) Int. Cl. C12Q 1/68; C12Q 1/02; C12N 5/00; C07H 21/00; C40B 40/06

(52) U.S. Cl. 435/6; 435/29; 435/375; 536/23.1; 506/16

(57) ABSTRACT

Methods, uses, products and kits are described relating to monitoring, assessing and modulating immune function and more particularly memory T cell function. Methods of identifying agents for such modulation are also described, as well as uses of such agents for modulating immune function.

### CROSS REFERENCE TO RELATED APPLICATIONS

[0001] This application claims the benefit, under 35 U.S.C. § 119(e), of U.S. provisional application Ser. No. 60/752,042 filed on Dec. 21, 2005, which is incorporated herein by reference in its entirety.

### FIELD OF THE INVENTION

[0002] The present invention relates to immune memory. More specifically, the present invention is concerned with reagents and methods for monitoring and modulating the immune response and memory T cells.

### BACKGROUND OF THE INVENTION

[0003] The generation and maintenance of memory T cells is central to the development of protective immunity, as characterized by a rapid and vigorous response following the encounter with a given pathogen or antigen (Kaech, S. M et al., Nat Rev Immunol 2:251-262; Sallusto, F et al., Annu Rev Immunol 22:745-763). Despite the complexity of the memory T cell populations, recent studies in both mice and humans indicate that the memory T cell pool is composed of two main compartments, central memory T cells (T_{CM}) and effector memory T cells (T_{EM}), which are characterized by distinct homing capacities and effector functions (Sallusto, F. et al., Nature 401:708-712; Fritsch, R. D. et al., J Immunol 175:6489-6497). Through their expression of CCR7 and CD62L, T_{CM} preferentially home to T-cell areas of secondary lymphoid organs and display little immediate effector functions; however, they readily proliferate and differentiate to effector cells in response to antigenic stimulation. T_{EM}, which have lost the constitutive expression of CCR7, express tissue homing receptors associated with inflammation and display more readily-effector functions.

[0004] The current model proposes that upon re-infection, T_{EM} rapidly constrain pathogen invasion in inflamed peripheral tissues, whereas T_{CM} are rapidly activated by dendritic cells (DCs) in secondary lymphoid organs and generate successive waves of effectors able to completely eliminate the pathogen (Sallusto, F et al., Annu Rev Immunol 22:745-763). Experiments performed in murine models suggest that T_{CM} have a better capacity to reconstitute the memory T-cell pool and to mediate protective immunity than T_{EM}, due to their greater capacity to proliferate and persist in vivo (Wu, C. Y. et al., Nat Immunol 3:852-858, Zaph, C. et al., Nat Med 10:1104-1110). Studies in primate models show that induction of central memory CD4⁺ T cells following SIV challenge correlates with prolonged survival (Letvin, N. L. et al., Science 312:1530-1533), thereby highlighting the importance of gaining a better understanding of the mechanisms underlying T_{CM} induction and persistence for successful vaccine development. The long-term maintenance of memory T cells relies on the survival of individual cells and their level of homeostatic cell division to compensate for their gradual attrition through apoptosis (Sallusto, F et al., Annu Rev Immunol 22:745-763; Sad, S., and L. Krishnan, Crit Rev Immunol 23:129-147). Using in vivo labeling with deuterated glucose to measure the turnover of distinct subsets of CD4⁺ T cells in healthy humans, Macallan et al. have shown that T_{EM} have a more rapid turnover than T_{CM}, suggesting that T_{EM} are being replaced at a faster rate than T_{CM} (Macallan, D. C. et al., J Exp Med 200:255-260). Studies in mouse models have suggested that signaling through TCR and γ-chain cytokine receptors might play a role for long-term survival of memory T cells (Seddon, B. et al., Nat Immunol 4:680-686; Kondrack, R. M. et al., J Exp Med 198:1797-1806; Patke, D. S., and D. L. Farber. J Immunol 174:5433-5443; Kassiotis, G. et al., J Exp Med 197:1007-1016). For example, memory CD4 cells persisted for extended periods upon adoptive transfer into intact or lymphopenic recipients but not in IL-7^{-/-} mice (Kondrack, R. M. et al., J Exp Med 198:1797-1806). Moreover, Kassiotis et al. have demonstrated that the homeostatic expansion capacity of both CD4⁺ naïve and memory cells is dependent upon the expression levels of TCR and CD5, a negative regulator of TCR signaling (Kassiotis, G. et al., J Exp Med 197:1007-1016).

[0005] Given the importance of memory T cells, and particularly central memory T cells, in the protection from various diseases such as infectious diseases, there is a need to develop new reagents and methods that influences their induction/maintenance and that permits their identification/detection.

[0006] The present description refers to a number of documents, the content of which is herein incorporated by reference in their entirety.

### SUMMARY OF THE INVENTION

[0007] The invention relates to methods, products, uses and kits for monitoring and modulating the immune response and memory T cells.

[0008] The present invention provides a method of identifying an agent capable of (a) inducing the level of memory T cells, (b) promoting the survival of memory T cells, or (c) both (a) and (b), comprising determining Foxo3a phosphorylation in the presence versus the absence of a test agent, wherein a higher level of phosphorylated Foxo3a in the presence of the agent is indicative that the agent is capable of (a) inducing the level of memory T cells, (b) promoting the survival of memory T cells, or (c) both (a) and (b).

[0009] In an embodiment, the above-mentioned phosphorylation is at a Foxo3a residue corresponding to Thr32, Ser253, Ser315, or any combination thereof.

[0010] In an embodiment, the above-mentioned memory T cell is a central memory T cell (T_{CM}).

[0011] In an other aspect, the present invention provides a method of identifying an agent capable of (a) inducing the level of memory T cells, (b) promoting the survival of memory T cells, or (c) both (a) and (b), comprising determining the expression of one or more nucleic acids or polypeptides comprising a sequence selected from SEQ ID NOs: 10-201 in a biological sample from an animal prior to versus after contacting the sample with a test agent, wherein a modulation of expression after contact with the agent relative to prior to contact with the agent is indicative that the agent is capable of (a) inducing the level of memory T cells, (b) promoting the survival of memory T cells, or (c) both (a) and (b).

[0012] In an embodiment, the above-mentioned memory T cells are central memory T cells, the above-mentioned modulation is an increase and the above-mentioned one or more nucleic acids or polypeptides comprises a sequence selected from SEQ ID NOs: 10-125 and 198-199.

[0013] In another embodiment, the above-mentioned memory T cells are effector memory T cells, the above-mentioned modulation is an increase and the above-mentioned one or more nucleic acids or polypeptides comprises a sequence selected from SEQ ID NOs: 126-197 and 200-201.

[0014] In an embodiment, the level of expression of at least 2 nucleic acids or polypeptides is determined. In an embodiment, the level of expression of at least 5 nucleic acids or polypeptides is determined. In an embodiment, the level of expression of at least 10 nucleic acids or polypeptides is determined. In an embodiment, the level of expression of at least 25 nucleic acids or polypeptides is determined. In an embodiment, the level of expression of at least 50 nucleic acids or polypeptides is determined.

[0015] In an embodiment, the above-mentioned one or more nucleic acids or polypeptides comprises a sequence selected from SEQ ID NOs: 12-25, 38-39, 50-53, 62-63, 82-83, 92-95, 100-107, 110-113, 126-129, 140-151, 154-169 and 174-187.

[0016] In an embodiment, the above-mentioned one or more nucleic acids or polypeptides comprises a sequence selected from SEQ ID NOs: 12-25, 38-39, 50-53, 62-63, 82-83, 92-95, 100-107 and 110-113.

[0017] In an embodiment, the above-mentioned one or more nucleic acids or polypeptides comprises a sequence selected from SEQ ID NOs: 126-129, 140-151, 154-169 and 174-187.

[0018] In an embodiment, the above-mentioned method further comprises determining the expression of one or more genes or polypeptides encoded thereby set forth in FIG. 2B.

[0019] In an other aspect, the present invention provides a method of identifying an agent capable of inducing protective immunity in an animal, comprising:
[0020] (i) providing a first expression profile of one or more nucleic acids or encoding polypeptides selected from BIRC5, CALM1, CAMK2G, CaMKIINalpha, DC-UbP, FAIM2, FOXL2, GATA2, GATA3, IL-7R, IRF1, KIT, MAPK6, MAPKAPK3, RAB11B, STMN1, TNFRSF7 (CD27), CLK1 and PRKARI B in a biological sample from an animal prior to contacting the sample with a test agent;
[0021] (ii) providing a second expression profile of one or more nucleic acids encoding a polypeptide selected from BIRC5, CALM1, CAMK2G, CaMKIINalpha, DC-UbP, FAIM2, FOXL2, GATA2, GATA3, IL-7R, IRF1, KIT, MAPK6, MAPKAPK3, RAB11B, STMN1, TNFRSF7 (CD27), CLK1 and PRKARI B in a biological sample from an animal after contacting the sample with the test agent;
[0022] (iii) providing a reference expression profile associated with the expression of one or more nucleic acids encoding a polypeptide selected from BIRC5, CALM1, CAMK2G, CaMKIINalpha, DC-UbP, FAIM2, FOXL2, GATA2, GATA3, IL-7R, IRF1, KIT, MAPK6, MAPKAPK3, RAB11B, STMN1, TNFRSF7 (CD27), CLK1 and PRKARI B in a biological sample from an animal exhibiting protective immunity;
   wherein increased similarity of the second expression profile to the reference expression profile, relative to the first expression profile to the reference expression profile, is indicative that the agent is capable of inducing protective immunity.

[0023] In an other aspect, the present invention provides a method of identifying an agent capable of inducing protective immunity in an animal, comprising determining the expression of one or more nucleic acids or polypeptides selected from BIRC5, CALM1, CAMK2G, CaMKIINalpha, DC-UbP, FAIM2, FOXL2, GATA2, GATA3, IL-7R, IRF1, KIT, MAPK6, MAPKAPK3, RAB11B, STMN1, TNFRSF7 (CD27), CLK1 and PRKARI B in a biological sample from an animal prior to versus after contacting the sample with a test agent, wherein a modulation of expression after contact with the agent relative to prior to contact with the agent is indicative that the agent is capable of inducing protective immunity.

[0024] In an embodiment, the above-mentioned modulation is an increase and the above-mentioned one or more nucleic acids or polypeptides is selected from BIRC5, CALM1, CAMK2G, CaMKIINalpha, DC-UbP, FAIM2, FOXL2, GATA2, GATA3, IL-7R, IRF1, KIT, MAPK6, MAPKAPK3, RAB11B, STMN1 and TNFRSF7 (CD27).

[0025] In an other embodiment, the above-mentioned modulation is a decrease and the above-mentioned one or more nucleic acids or encoding polypeptides is selected from CLK1 and PRKARI B.

[0026] In an embodiment, the above-mentioned agent is a vaccine.

[0027] In an embodiment, the above-mentioned subject exhibiting protective immunity is a subject vaccinated with a vaccine known to confer immune protection. In a further embodiment, the above-mentioned vaccine is Yellow Fever vaccine.

[0028] In an embodiment, the above-mentioned method comprises providing the expression profile of at least 2 nucleic acids or polypeptides.

[0029] In an embodiment, the above-mentioned method comprises providing the expression profile of at least 5 nucleic acids or polypeptides.

[0030] In an embodiment, the above-mentioned method comprises providing the expression profile of at least 10 nucleic acids or polypeptides.

[0031] In an embodiment, the above-mentioned biological sample is a tissue or body fluid. In a further embodiment, the above-mentioned biological sample is blood or comprises a blood cell. In a further embodiment, the above-mentioned blood cell is a Peripheral Blood Mononuclear Cell (PBMC). In a further embodiment, the above-mentioned Peripheral Blood Mononuclear Cell (PBMC) is an immune cell. In a further embodiment, the above-mentioned immune cell is a CD4⁺ or CD8⁺ memory T cell. In a further embodiment the above-mentioned memory T cell is a central memory T cell (T_{CM}).

[0032] In an embodiment, the above-mentioned level of expression or expression profile is determined at the nucleic acid level using a technique selected from the group consisting of Northern blot analysis, reverse transcription PCR, real time quantitative PCR, microarray analysis and RNase protection.

[0033] In an other embodiment, the above-mentioned level of expression or expression profile is determined at the polypeptide level. In an other embodiment, the above-mentioned level of expression or expression profile of the polypeptide is determined using a reagent which specifically binds with the polypeptide. In a further embodiment, the above-mentioned reagent is an antibody or an antigen binding fragment thereof.

[0034] In an other embodiment, the above-mentioned level of expression or expression profile is determined using a method selected from the group consisting of Western blot, immunoblot, enzyme-linked immunosorbant assay (ELISA), radioimmunoassay (RIA), immunoprecipitation, surface plasmon resonance, chemiluminescence, fluorescent polarization, phosphorescence, immunohistochemical analysis, matrix-assisted laser desorption/ionization time-of-flight (MALDI-TOF) mass spectrometry, microcytometry, microarray, microscopy, fluorescence activated cell sorting (FACS), flow cytometry and antibody microarray.

[0035] In an other aspect, the present invention provides a method of inducing the survival of a memory T cell, said method comprising contacting said cell with an agent capable of phosphorylating Foxo3a.

[0036] In an other aspect, the present invention provides a method of increasing immune function in a subject, said method comprising inducing the phosphorylation of Foxo3a in an immune cell of said subject.

[0037] In an embodiment, the above-mentioned immune function is memory T cell function. In a further embodiment, the above-mentioned memory T cell function is memory T cell survival or persistence.

[0038] In an other aspect, the present invention provides a method of determining whether an HIV-positive subject possesses natural resistance to the development of AIDS, said method comprising:
[0039] (i) providing a first expression profile of one or more nucleic acids encoding a polypeptide selected from XIAP, GADD45, DUSP1, PTEN, SOCS1 and SOCS2 in a biological sample from said subject,
[0040] (ii) providing a reference expression profile of said one or more nucleic acids in a biological sample from a reference subject known to be an HIV-positive long term non-progressor,
   wherein a similarity of the first expression profile to the reference expression profile is indicative that the HIV-infected subject possesses natural resistance to the development of AIDS

[0041] In an other aspect, the present invention provides a collection of two or more isolated nucleic acid sequences which are substantially identical to two or more isolated respective nucleic acid sequences encoding two or more respective polypeptides selected from SEQ ID NOs: 10-201, their complements or portions thereof.

[0042] In an embodiment, the above-mentioned collection comprises at least 5 isolated nucleic acid sequences encoding at least 5 polypeptides, their complements or portions thereof.

[0043] In an embodiment, the above-mentioned collection comprises at least 10 isolated nucleic acid sequences encoding at least 10 polypeptides, their complements or portions thereof.

[0044] In an embodiment, the above-mentioned collection comprises at least 25 isolated nucleic acid sequences encoding at least 25 polypeptides, their complements or portions thereof.

[0045] In an embodiment, the above-mentioned collection comprises at least 50 isolated nucleic acid sequences encoding at least 50 polypeptides, their complements or portions thereof.

[0046] In an embodiment, the above-mentioned collection comprises isolated nucleic acid sequences encoding all polypeptides defined above, their complements or portions thereof.

[0047] In an embodiment, the above-mentioned isolated nucleic acid sequences are immobilized on a substrate.

[0048] In an embodiment, the above-mentioned isolated nucleic acid sequences are conjugated to a detectable marker.

[0049] In an embodiment, the above-mentioned isolated nucleic acid sequences are hybridizable array elements in a microarray.

[0050] In an other aspect, the present invention provides an array comprising a substrate and a collection of bound nucleic acids, each of said nucleic acids being bound to said substrate at a discrete location, wherein said collection of bound nucleic acids is the collection defined above.

[0051] In an other aspect, the present invention provides a composition for the prevention or treatment of an immune disease in a subject, said composition comprising:
[0052] (i) an agent capable of (a) phosphorylating Foxo3a in an immune cell, (b) increasing the expression of one or more nucleic acids or encoding polypeptides comprising a sequence selected from SEQ ID NOs: 12-25, 38-39, 50-53, 62-63, 82-83, 92-95, 100-107 and 110-113, (c) both (a) and (b), in said subject; and
[0053] (ii) a pharmaceutically acceptable carrier.

[0054] In an other aspect, the present invention provides a use of the above-mentioned composition for the prevention or treatment of an immune disease.

[0055] In an other aspect, the present invention provides a use of the above-mentioned composition for the preparation of a medicament for the prevention or treatment of an immune disease.

[0056] In an other aspect, the present invention provides a use of an agent capable of (a) phosphorylating Foxo3a, (b) increasing the expression of one or more nucleic acids or encoding polypeptides selected from comprising a sequence selected from SEQ ID NOs: 12-25, 38-39, 50-53, 62-63, 82-83, 92-95, 100-107 and 110-113, (c) both (a) and (b) for the prevention or treatment of an immune disease.

[0057] In an other aspect, the present invention provides a use of an agent capable of (a) phosphorylating Foxo3a, (b) increasing the expression of one or more nucleic acids or encoding polypeptides comprising a sequence selected from SEQ ID NOs: 12-25, 38-39, 50-53, 62-63, 82-83, 92-95, 100-107 and 110-113, (c) both (a) and (b) for the preparation of a medicament for the prevention or treatment of an immune disease.

[0058] In an other aspect, the present invention provides a package comprising the above-mentioned composition together with instructions for its use for the prevention or treatment of an immune disease.

[0059] In an other aspect, the present invention provides a package comprising:
[0060] (i) an agent capable of (a) phosphorylating Foxo3a, (b) increasing the expression of one or more nucleic acids or encoding polypeptides comprising a sequence selected from SEQ ID NOs: 12-25, 38-39, 50-53, 62-63, 82-83, 92-95, 100-107 and 110-113, (c) both (a) and (b) in a subject; and
[0061] (ii) instructions for its use for the treatment or prevention of an immune disease in said subject

[0062] In an embodiment, the above-mentioned immune disease is immune deficiency. In a further embodiment, the above-mentioned immune deficiency is a deficiency in a memory T cell. In a further embodiment, the above-mentioned memory T cell is a central memory T cells (T_{CM}). In a further embodiment, the above-mentioned central memory T cells (T_{CM}) is a CD4⁺ central memory T cell.

[0063] In an embodiment, the herein-mentioned nucleic acid, polypeptide or gene is associated with apoptosis and/or cell survival including any pathway related thereto. Examples of such genes are set forth in FIG. 3.

[0064] Other objects, advantages and features of the present invention will become more apparent upon reading of the following non-restrictive description of specific embodiments thereof, given by way of example only with reference to the accompanying drawings.

### BRIEF DESCRIPTION OF THE DRAWINGS

[0065] FIG. 1: Functional and phenotypical characterization of CD4+T_{CM} and T_{EM}-(A) CD45RA, CD27 and CCR7 labeling profile and gating strategy for naïve, T_{CM} and T_{EM}. Percentages obtained for each population are indicated. Purity of sorted cells was always above 95%. (B) Perforin and Granzyme-B (Gr-B) expression in ex-vivo T_{CM} and T_{EM} subsets. Perforin and Gr-B expression were assayed by intracellular staining. The percentages of T_{CM} and T_{EM} expressing Perforin and Gr-B are indicated in each quadrant. (C) Rab27a protein levels in ex-vivo sorted T_{CM} and T_{EM} subsets. Similar results were obtained in three independent experiments. (D) Susceptibility of T_{CM} and T_{EM} towards Fas-induced apoptosis. T_{CM} and T_{EM} were sorted by flow cytometry and treated with anti-Fas antibodies (CH11:1.25 μg/ml) or etoposide (100 μg/ml) for 24 hours. The percentage of apoptotic cells was assessed by flow cytometry using Annexin-V labeling. The results are depicted as a percentage of apoptotic cells ±SD of three independent experiments. (E) Proliferation and persistence of purified T_{CM} and T_{EM}. Sorted T_{CM} and T_{EM} were co-cultured with autologous mature dendritic cells in the presence of superantigen (staphylococcal enterotoxin A, SEA) for 15 days. After 1 to 15 days, the proportion of proliferating cells was assessed by staining of anti-TCRVβ22, as Vβ22 is known to be a highly SEA-reactive Vβ (Lavoie P M et al., 2005. Int Immunol., 17(7):931-41). Results are represented as the % of Vβ22 positive cells.

[0066] FIG. 2. Gene expression profiling of CD4⁺ T_{CM} and T_{EM}. CD4⁺ T cell subsets (central and effector memory) were purified from blood samples collected from healthy individuals by flow cytometry-based cell sorting using monoclonal antibodies directed against CD4, CD45RA, CCR7 and CD27. Messenger RNA (mRNA) was isolated from sorted CD4⁺ T_{CM} and T_{EM}, converted into cDNA and gene expression was analyzed by cDNA microarray. A. List of most significant genes differentially expressed between T_{CM} and T_{EM}. B. List of other genes whose expression differs between T_{CM} and T_{EM}. Genes expressed at higher level in T_{EM} as compared to T_{CM} are highlighted in grey. Each gene on the arrays was performed in duplicate to avoid false-positive signals. Fold change values were obtained from the average value of 13 independent hybridizations. The p-values were determined by ANOVA, based on F-test. Avg FDE=Average fold difference in expression in T_{CM} vs. T_{EM} (positive numbers represent genes having a higher expression in T_{CM} whereas negative numbers represent genes having a higher expression in T_{EM}.

[0067] FIG. 3. Differential expression of apoptosis-related genes in CD4⁺ T_{CM} and T_{EM}. Significant genes were selected using ANOVA t-test (p<0.05 or fold change >1.3) and associated with an “apoptosis” GO annotation. Each gene on the arrays was spotted in duplicate to avoid false-positive signals and to ensure the reproducibility of the data obtained. The fold-change values were obtained from the average value of thirteen independent hybridizations (AVG FC). The genes upregulated in T_{EM} are highlighted in grey. The p-values were determined by ANOVA, based on F-test. Fold change values were calculated from the average value of thirteen independent hybridizations by subtracting the mean expression of the log 2 ratio obtained in T_{CM} from the log 2 ratio obtained in T_{EM}. That value was then converted into fold change.

[0068] FIG. 4. Quantification of gene expression in CD4⁺ T_{CM} and T_{EM} by RT-PCR. CD4 T cell subsets (central and effector memory) were purified as described above. Messenger RNA (mRNA) was isolated from sorted CD4⁺ T_{CM} and T_{EM}, converted into cDNA, and the expression of selected genes (listed in the first column) was analyzed by quantitative RT-PCR using primers specific for each gene. The primers were synthesized by Applied Biosystems based on the following context sequences:

| | |
|---|---|
| CDKN1B (p27kip): | |
| AACCGACGATTCTTCTACTCAAAAC; | (SEQ ID NO: 1) |
| CD27: | |
| GCACTGTAACTCTGGTCTTCTCGTT; | (SEQ ID NO: 2) |
| GADD45a: | |
| TGCGTGCTGGTGACGAATCCACATT; | (SEQ ID NO: 3) |
| DUSP6: | |
| CCATTTCTTTCATAGATGAAGCCCG; | (SEQ ID NO: 4) |
| PIM2: | |
| TCCCCCTTGTCAGACTCAGTCACAT; | (SEQ ID NO: 5) |
| pRb2/p130: | |
| ATTTTGACAAGTCCAAAGCACTTAG; | (SEQ ID NO: 6) |
| FasL: | |
| GAAGCAAATAGGCCACCCCAGTCCA; | (SEQ ID NO: 7) |
| Bim: | |
| TCAGTGCAATGGCTTCCATGAGGCA; | (SEQ ID NO: 8) |
| LKLF: | |
| CTGCAGGAGCGCTGGCCGCGCGCCG | (SEQ ID NO: 9) |

The numbers indicate the fold up-regulation of transcript level in T_{CM} vs. T_{EM} (second column) or T_{EM} vs. T_{CM} (third column), following normalization to GAPDH and Actin levels. These results represent the average value of two independent experiments performed on sample from two different blood donors.

[0069] FIG. 5. STAT5a signaling pathway is functionally upregulated in T_{CM}. (A) PIM-1 and PIM-2 proteins levels in ex-vivo sorted T_{CM} and T_{EM} subsets. Similar results were obtained in three independent experiments. (B, C and D) PBMCs from healthy donors were treated with IL-2 (100 U/ml) or IL-7 (10 ng/ml) for 15 min at 37° C. Cells were then labeled with Abs to CD4, CD27, CCR7, CD45RA and pSTAT5a. (B) Representative example of pSTAT5a expression levels. T_{CM}-gated cells are represented in light grey and T_{EM}-gated cells are represented in black. (C) Mean Fluorescence Intensity (MFI) of pSTAT5a level of expression measured in response to IL-2 or IL-7, in T_{CM} and T_{EM} (n=4). Mean pSTAT5a signal values are represented by black bars. P-values (determined by a two-tailed T-test) are shown (D) Expression level of CD127, CD25 and CD132 in ex-vivo T_{CM} and T_{EM}. PBMCs were labeled with Abs to CD4, CD27, CCR7 and CD45RA to identify T cells subsets in conjunction with anti-CD127 or anti-CD25 specific Abs. The results represent the proportions of CD127 and CD25 positive cells on T_{CM}- and T_{EM}-gated T cells (% of positive cells ±SD of five independent experiments).

[0070] FIG. 6. Regulation of the FOXO3a pathway in memory CD4⁺ T cell subsets. (A) FOXO3a, pFOXO3a (S315, S253 or T32), Bim, p130 and Gadd45a protein levels in ex-vivo sorted T_{CM} and T_{EM}. (B) Expression of FasL on activated T_{CM} and T_{EM}. PBMC were activated with phorbol myristate acetate (PMA) (10 ng/ml) and lonomycin (500 ng/ml) for 24 hours. Intracellular staining was performed using CD4, CD27, CD45RA, CCR7 and FasL antibodies. The percentages of FasL positive cells for each subset are indicated. MFI values are indicated in brackets.

[0071] FIG. 7. AKT and IKK mediate FOXO3a phosphorylation and survival in CD4⁺ T cell. (A) Regulation of FOXO3a phosphorylation. Purified CD4⁺ T Cells were pre-treated for 1 hour with kinase inhibitors (AKT-VI, AKT inhibitor: 10 μM; STO-609, CamKK inhibitor: 5 μg/ml; Wedelolactone, IKK inhibitor: 100 μM and U0126, MEK1/2 inhibitor: 50 μM). pFoxo3a (S253) was assessed. The results are representative of two independent experiments. (B) CD4⁺ T cell susceptibility to apoptosis induced upon treatment with specific kinase inhibitors. CD4⁺ T cells were cultured in the presence of kinase inhibitors for 24 hrs (U0126:100 μM; STO-609:10 μg/ml; Wedelolactone and AKT-IV as indicated). After 24 h, the proportion of Annexin-V⁺, propidium iodide (PI)⁺ cells was quantified by flow cytometry. The results are depicted as a percentage of apoptotic cells within the total population and are representative of two independent experiments. (C) Bim expression levels in response to AKT and IKK inhibitors. CD4⁺ T cells were treated with AKT-IV (1.6 μM) or wedelolactone (100 μM) for 24 h. Cells were analyzed by Western Blot (WB) using Bim specific antibodies. (D and E) Regulation of AKT and IKK phosphorylation in 4⁺ memory subsets. (D) pIKKαβ (S176/180) protein levels in ex-vivo sorted T_{CM} and T_{EM}. Prolonged exposure did not reveal any pIKK signal in T_{EM}. Similar results were obtained in three independent experiments. (E) PBMCs, from healthy donors, were treated with H₂O₂ (5 mM) or Ig-cross-linked CD28 (2 Hg/ml) for 15 min at 37° C. and labeled with CD4, CD27, CD45RA and pAKT (S473) specific antibodies. The levels of pAKT were assessed by flow cytometry in T_{CM}- and T_{EM}-gated subsets. The results are represented as the mean fold increase ±SD, calculated as (MFI of stimulated cells/MFI of un-stimulated cells) of five independent experiments. Values of p (determined by two-tailed T-test) are shown.

[0072] FIG. 8. Susceptibility of T_{CM} and T_{EM} to apoptosis induced by kinase inhibitors. Sorted T_{CM} and T_{EM} were cultured with or without AKT and IKK inhibitors as indicated. After 24 h, the percentage of apoptotic cells was quantified by Annexin-V-FITC labeling. Upper panel depict Results from a representative individual. Histogram plots show the percent of Annexin-V positive cells in T_{CM} and T_{EM} cells following a 24 h exposure to AKT or IKK-inhibitors. The dashed lines correspond to untreated cells while the plain lines correspond to cells treated with kinase-inhibitors. Lower panel is a bar graph representation of the fold increase of apoptosis in T_{CM} and T_{EM} in response to IKK or AKT inhibitor. The fold increase of apoptosis is calculated as % of apoptotic cells in treated cells divided by the % of apoptotic cells in untreated cells. Similar results were obtained in two independent experiments.

[0073] FIG. 9. FOXO3a phosphorylation is induced by TCR and cytokine engagement. (A) CD4⁺ T cells were cultured in the presence of anti-CD3 (2 μg/ml), anti-CD28 (2 μg/ml), anti-CD3+CD28, IL-2 (100 U/ml), IL-7 (10 ng/ml), IFN-γ (50 μg/ml) or PMA (50 ng/ml) for 15 min and analyzed by Western Blot for pFOXO3a (S315 and S253) expression levels. The results are representative of two independent experiments. (B) CD4⁺ T cells were cultured in the presence of anti-CD3/anti-CD28, IL-2 (100 U/ml), IL-7 (10 ng/ml) for 30 min and analyzed by Western Blot for pFOXO3a (T32) expression levels. Similar results were obtained in two independent experiments.

[0074] FIG. 10. Comparison of the expression of selected genes in T_{CM} and T_{EM} isolated from aviremic HAART-treated HIV-infected individuals vs. long-term non-progressors (LTNPs) Cells were sorted from PBMC obtained from LTNP and aviremic HAART-treated patients into T_{CM} and T_{EM} using CD27, CCR7 and CD45RA surface markers. Sorted cells were subjected to RNA isolation, amplification and gene array analysis. This figure shows differences in T_{CM} and T_{EM} from LTNP versus T_{CM} and T_{EM} from aviremic chronically infected HIV patients.

[0075] FIG. 11. Comparison of the expression of genes in blood samples isolated from Yellow Fever-vaccinated individuals. Blood samples were collected at different time points (before vaccination (day 0), day 3 and 7 post-vaccination) from 8 subjects vaccinated against Yellow Fever (Yellow Fever 17D vaccine).

### DESCRIPTION OF ILLUSTRATIVE EMBODIMENTS

[0076] In the studies described herein, the gene expression profile of subpopulations of memory CD4 T cells was analyzed. It was found that several genes are differentially expressed in central memory T cells (T_{CM}) vs. effector memory T cells (T_{EM}), notably genes associated with cell survival/apoptosis. T_{CM} tend to express higher levels of specific genes associated with cell survival and inhibition of apoptosis, whereas T_{EM} generally express higher levels of genes associated with induction of apoptosis.

[0077] Accordingly, the present invention relates to monitoring/detecting as well as modulating memory T cells based on such correlation of gene expression.

[0078] The invention provides a screening method for identifying agents/compounds that can be used for (a) induce the level of memory T cells, (b) promote the survival of memory T cells, or (c) both (a) and (b) based on their ability to phosphorylate Foxo3a. In an embodiment, the method comprises determining Foxo3a phosphorylation in the presence versus the absence of the agent. A higher level of phosphorylated Foxo3a in the presence of the agent is indicative that the agent is capable of (a) inducing the level of memory T cells, (b) promoting the survival of memory T cells, or (c) both (a) and (b). In an embodiment, the phosphorylation of Foxo3a is at a Foxo3a residue corresponding to Thr32, Ser253, Ser315, or any combination thereof. The extent of Foxo3a phosphorylation can be determined, for example, using antibodies specific for one or more phosphorylated forms of Foxo3a (see Example 6).

[0079] In another embodiment, the method comprises determining the expression of one or more nucleic acids encoding a polypeptide selected from HLA-G, MAL, NGFRAP1, HRMT1L2, ATXN3, TNFRSF7 (CD27), ING1, E2F4, RELA, TOSO, INDO, SFRP4, PABPC1, ARL7, PIM2, TAP1, CD37, LPPR4, IMPDH2, LOC112476, TGFBR2, CCNL1, GRK5, Stat5a, RALA, CSTB, SNF1LK, CAV1, MYO1E, B2M, NFIC, SYT6, RRM1, OAS1, IMPDH2, DMGDH, PNRC2, LIMS1, PARVG, FYN, LILRA2, FTL, SOCS1, PF4, ERG, IFIT1, NCOR2, IL16, TCIRG1, PITPNB, PABPC4, MAN2A1, SPN, TNFRSF8, RFX2, RGS13, LTA4H, S100A8, TCF3, TIAM1, CART, PPP2R2C, PIAS4, PRKCQ, NME2, SLC2A3, ATF4, IL2RG, COL3A1, PPM1D, SEC23A, LIMK2, BAT3, RGS10, STAT6, RASL12, C1QG, GPR18, NOTCH3, C1orf38, BTF3, CCL19, PES1, C1QA, ZNF593, TNF-α, POLD2, DTYMK, E2F1, STAU, IFNGR2, NRG1, TNFSF7, JARIDLA, BLR1, PLCL2, MKI67, IDUA, FEZ1, MAPKAPK5, DLC1, MAP4K2, VAV3, BATF, BIRC6, CEP2, DDAH2, PLK4, GTF2F2, FADS1, FHIT, SPOCK, TLK1, DDX5, NGFR, FYB, USP10, TCF7, RAMP1, AGPAT5, EDA, PPP3CC, HNRPK, TPR, CHUK, ANXA1, SMARCA4, CLK1, CCL3, CALM3, ALOX5, LCN2, NUP88 and LKLF in a biological sample from an animal prior to versus after administration of a test agent/compound to the subject, or in a biological sample from an animal or prior to versus after contacting the sample with a test agent. A higher level of expression following the administration is indicative that the agent is capable of capable of (a) inducing the level of memory T cells, (b) promoting the survival of memory T cells, or (c) both (a) and (b).

[0080] In an embodiment, the above-mentioned memory T cells are central memory T cells (T_{CM}). In a further embodiment, the above-mentioned central memory T cells are 4⁺ central memory T cells.

[0081] The agents/compounds identified by these screening methods can be used for the prevention or treatment of immune disorders, and more particularly immune deficiencies associated with low levels of memory T cells.

[0082] In another aspect, the present invention provides a method of determining whether an agent (e.g., a vaccine or an immunotherapeutic agent) is capable of inducing protective immunity in an animal, comprising:

[0083] (i) providing a first expression profile of one or more nucleic acids encoding a polypeptide selected from BIRC5, CALM1, CAMK2G, CaMKIINalpha, DC-UbP, FAIM2, FOXL2, GATA2, GATA3, IL-7R, IRF1, KIT, MAPK6, MAPKAPK3, RAB11B, STMN1, TNFRSF7 (CD27), CLK1 and PRKARI B in a biological sample from said animal prior to administration of the agent to the subject, or in a biological sample from an animal prior to contacting the sample with the agent,

[0084] (ii) providing a second expression profile of one or more nucleic acids encoding a polypeptide selected from BIRC5, CALM1, CAMK2G, CaMKIINalpha, DC-UbP, FAIM2, FOXL2, GATA2, GATA3, IL-7R, IRF1, KIT, MAPK6, MAPKAPK3, RAB11B, STMN1, TNFRSF7 (CD27), CLK1 and PRKARI B in a biological sample from said animal following administration of the agent to the subject, or in a biological sample from an animal after contacting the sample with the agent,

[0085] (iii) providing a reference expression profile associated with the expression of one or more nucleic acids encoding a polypeptide selected from BIRC5, CALM1, CAMK2G, CaMKIINalpha, DC-UbP, FAIM2, FOXL2, GATA2, GATA3, IL-7R, IRF1, KIT, MAPK6, MAPKAPK3, RAB11B, STMN1, TNFRSF7 (CD27), CLK1 and PRKARI B in a biological sample from an animal exhibiting protective immunity; wherein increased similarity of the second expression profile to the reference expression profile, relative to the first expression profile to the reference expression profile, is indicative that the agent is capable of inducing protective immunity.

[0086] The screening methods mentioned herein may be employed either with a single test compound/agent or a plurality or library (e.g. a combinatorial library) of test compounds. In the latter case, synergistic effects provided by combinations of compounds may also be identified and characterized. The above-mentioned compounds may be used for inducing the level of memory T cells and/or promoting the survival of memory T cells, or may be used as lead compounds for the development and testing of additional compounds having improved specificity, efficacy and/or pharmacological (e.g. pharmacokinetic) properties. In an embodiment the compound may be a prodrug which is altered into its active form at the appropriate site of action, e.g. in lymphoid organs. In certain embodiments, one or a plurality of the steps of the screening/testing methods of the invention may be automated.

[0087] Expression levels may in general be detected by either detecting mRNA from the cells and/or detecting expression products, such as polypeptides and proteins. Expression of the transcripts and/or proteins encoded by the nucleic acids described herein may be measured by any of a variety of known methods in the art. In general, the nucleic acid sequence of a nucleic acid molecule (e.g., DNA or RNA) in a patient sample can be detected by any suitable method or technique of measuring or detecting gene sequence or expression. Such methods include, but are not limited to, polymerase chain reaction (PCR), reverse transcriptase-PCR (RT-PCR), in situ PCR, quantitative PCR (q-PCR), in situ hybridization, Southern blot, Northern blot, sequence analysis, microarray analysis, detection of a reporter gene, or other DNA/RNA hybridization platforms. For RNA expression, preferred methods include, but are not limited to: extraction of cellular mRNA and Northern blotting using labeled probes that hybridize to transcripts encoding all or part of one or more of the genes of this invention; amplification of mRNA expressed from one or more of the genes of this invention using gene-specific primers, polymerase chain reaction (PCR), quantitative PCR (q-PCR), and reverse transcriptase-polymerase chain reaction (RT-PCR), followed by quantitative detection of the product by any of a variety of means; extraction of total RNA from the cells, which is then labeled and used to probe cDNAs or oligonucleotides encoding all or part of the genes of this invention, arrayed on any of a variety of surfaces; in situ hybridization; and detection of a reporter gene. The term “quantifying” or “quantitating” when used in the context of quantifying transcription levels of a gene can refer to absolute or to relative quantification. Absolute quantification may be accomplished by inclusion of known concentration(s) of one or more target nucleic acids and referencing the hybridization intensity of unknowns with the known target nucleic acids (e.g., through generation of a standard curve). Alternatively, relative quantification can be accomplished by comparison of hybridization signals between two or more genes, or between two or more treatments to quantify the changes in hybridization intensity and, by implication, transcription level.

[0088] Methods to measure protein expression levels of selected genes of this invention, include, but are not limited to: Western blot, immunoblot, enzyme-linked immunosorbant assay (ELISA), radioimmunoassay (RIA), immunoprecipitation, surface plasmon resonance, chemiluminescence, fluorescent polarization, phosphorescence, immunohistochemical analysis, matrix-assisted laser desorption/ionization time-of-flight (MALDI-TOF) mass spectrometry, microcytometry, microarray, microscopy, fluorescence activated cell sorting (FACS), flow cytometry, and assays based on a property of the protein including but not limited to DNA binding, ligand binding, or interaction with other protein partners.

[0089] Methods for normalizing the level of expression of a gene are well known in the art. For example, the expression level of a gene of the present invention can be normalized on the basis of the relative ratio of the mRNA level of this gene to the mRNA level of a housekeeping gene or the relative ratio of the protein level of the protein encoded by this gene to the protein level of the housekeeping protein, so that variations in the sample extraction efficiency among cells or tissues are reduced in the evaluation of the gene expression level. A “housekeeping gene” is a gene the expression of which is substantially the same from sample to sample or from tissue to tissue, or one that is relatively refractory to change in response to external stimuli. A housekeeping gene can be any RNA molecule other than that encoded by the gene of interest that will allow normalization of sample RNA or any other marker that can be used to normalize for the amount of total RNA added to each reaction. For example, the GAPDH gene, the G6PD gene, the actin gene, ribosomal RNA, 36B4 RNA, PGK1, RPLP0, or the like, may be used as a housekeeping gene.

[0090] Methods for normalizing/calibrating the level of expression of a gene are well known in the art. For example, the expression of a gene can be calibrated using reference samples, which are commercially available. Examples of reference samples include, but are not limited to: Stratagene® QPCR Human Reference Total RNA, Clontech™ Universal Reference Total RNA, and XpressRef™ Universal Reference Total RNA. Other methods are also described in Steinhoff and Vingron, Brief Bioinform. 2006 7(2):166-77; Fujita A. et al., BMC Bioinformatics. 2006. 7:469; and Tallat A M et al., Nucleic Acids Res. (2002). 30(20):e104, which are hereby incorporated by reference in their entireties.

[0091] Further, the normalization and calibration of gene expression may be performed in a straightforward manner for predictive models that involve pairs of predictive genes in competitive relationships, i.e. ratio of gene 1 over gene 2 in a predictive gene pair, obviating the need for additional reference genes. Instead of reporting the level of a predictive gene with respect to a separate housekeeping gene and/or reference sample, the level of predictive gene 1 with respect to predictive gene 2 directly provides for a relative expression measurement ratio with high information content.

[0092] Gene expression profiling or monitoring is a useful way to distinguish between cells that express different phenotypes. For example, cells that are derived from different organs/tissues, have different ages or different physiological states. In an embodiment, gene expression profiling can distinguish between different types or subsets of memory T cells. In an embodiment, gene expression profiling can distinguish between different types of immune responses, for example a protective versus a non-protective immune response.

Expression profile: One measurement of cellular constituents that is particularly useful in the present invention is the expression profile. As used herein, an “expression profile” comprises measurement of the relative abundance of one or more cellular constituents. Such measurements may include RNA or protein abundances or activity levels. An expression profile involves providing a pool of target nucleic acid molecules or polypeptides, hybridizing the pool to an array of probes immobilized on predetermined regions of a surface, and quantifying the hybridized nucleic acid molecules or proteins. The expression profile can be a measurement, for example, of the transcriptional state or the translational state of the cell. See U.S. Pat. Nos. 6,040,138, 6,013,449 and 5,800,992, which are hereby incorporated by reference in their entirety.

[0093] Similarity, with respect to gene expression profiles, means that the genes whose expression is measured exhibit the same trend in expression, and is not limited to absolute equivalence in expression levels. For example, two different samples in which a given gene shows a higher expression than an internal control would be considered to have “similar” expression profiles. In an embodiment, at least one gene exhibits the same trend in expression. In an embodiment, at least two genes exhibit the same trend in expression. In an embodiment, at least three genes exhibit the same trend in expression. In an embodiment, at least four genes exhibit the same trend in expression. In an embodiment, at least five genes exhibit the same trend in expression. In an embodiment, at least ten genes exhibit the same trend in expression. In an embodiment, at least twenty genes exhibit the same trend in expression. In an embodiment, at least fifty genes exhibit the same trend in expression.

[0094] Nucleic acid arrays are particularly useful for detecting the expression of the genes of the present invention. The production and application of high-density arrays in gene expression monitoring have been disclosed previously in, for example, PCT Publication No. WO 97/10365; PCT Publication No. WO 92/10588; U.S. Pat. No. 6,040,138; U.S. Pat. No. 5,445,934; or PCT Publication No. WO 95/35505, all of which are incorporated herein by reference in their entireties. Also for examples of arrays, see Hacia et al., Nature Genetics 14:441; Lockhart et al., Nat. Biotechnol. 14:1675-1680; and De Risi et al., Nature Genetics 14:457, each of which is incorporated by reference in its entirety. In general, in an array, an oligonucleotide, a cDNA, or genomic DNA, that is a portion of a known gene, occupies a known location on a substrate. A nucleic acid target sample is hybridized with an array of such oligonucleotides and then the amount of target nucleic acids hybridized to each probe in the array is quantified. One preferred quantifying method is to use confocal microscope and fluorescent labels. The Affymetrix GeneChip™ Array system (Affymetrix, Santa Clara, Calif.) and the Atlas™ Human cDNA Expression Array system are particularly suitable for quantifying the hybridization; however, it will be apparent to those of skill in the art that any similar systems or other effectively equivalent detection methods can also be used. In a particularly preferred embodiment, one can use the knowledge of the genes described herein to design novel arrays of polynucleotides, cDNAs or genomic DNAs for screening methods described herein. Such novel pluralities of polynucleotides are contemplated to be a part of the present invention and are described in detail below.

[0095] Suitable nucleic acid samples for screening on an array contain transcripts of interest or nucleic acids derived from the transcripts of interest (e.g., transcripts derived from the genes highly expressed in T_{CM} of the present invention). As used herein, a nucleic acid derived from a transcript refers to a nucleic acid for whose synthesis the mRNA transcript or a subsequence thereof has ultimately served as a template. Thus, a cDNA reverse transcribed from a transcript, an RNA transcribed from that cDNA, a DNA amplified from the cDNA, an RNA transcribed from the amplified DNA, etc., are all derived from the transcript and detection of such derived products is indicative of the presence and/or abundance of the original transcript in a sample. Thus, suitable samples include, but are not limited to, transcripts of the gene or genes, cDNA reverse transcribed from the transcript, cRNA transcribed from the cDNA, DNA amplified from the genes, RNA transcribed from amplified DNA, and the like. Preferably, such a sample is a total RNA preparation of a biological sample (e.g., peripheral blood mononuclear cells or PBMCs, immune cells, immune cell subpopulations such as memory T cells). More preferably in some embodiments, such a nucleic acid sample is the total mRNA isolated from such a biological sample.

[0096] Methods of isolating total mRNA are well known to those of skill in the art. In one embodiment, the total nucleic acid is isolated from a given sample using, for example, an acid guanidinium-phenol-chloroform extraction method and polyA and mRNA is isolated by oligo dT column chromatography or by using (dT)n magnetic beads (see, e.g., Sambrook et al., Molecular Cloning: A Laboratory Manual (2nd ed.), Vols. 1-3, Cold Spring Harbor Laboratory, (1989), or Current Protocols in Molecular Biology, F. Ausubel et al., ad. Greene Publishing and Wiley-Interscience, New York (1987)). Also, kits for the isolation of total RNA or mRNA are commercially available (e.g., Qiagen RNeasy Mini Kit, New England BioLabs polyA Spin™ mRNA isolation kit).

[0097] In general, typical biological samples include, but are not limited to, sputum, serum, lymphatic fluid, blood, blood cells (e.g., peripheral blood mononuclear cells), tissue or fine needle biopsy samples, urine, peritoneal fluid, colostrums, breast milk, fetal fluid, tears, and pleural fluid, or cells therefrom. In embodiments, the determination of expression levels is performed using peripheral blood mononuclear cells, such as immune cells, such as 4⁺ and CD8+ T cells. In embodiments, the determination of expression levels is performed using CD4 or CD8 T cell subsets, such as central memory or effector memory T cells.

[0098] In further embodiments, the invention relates to the use of nucleic acid(s) (e.g., a probe(s)) which is substantially homologous/identical or substantially complementary (e.g., for hybridization under moderately stringent or stringent conditions) to a nucleic acid sequence encoding one or more genes selected from the group consisting of HLA-G, MAL, NGFRAP1, HRMT1L2, ATXN3, TNFRSF7 (CD27), ING1, E2F4, RELA, TOSO, INDO, SFRP4, PABPC1, ARL7, PIM2, TAP1, CD37, LPPR4, IMPDH2, LOC112476, TGFBR2, CCNL1, GRK5, Stat5a, RALA, CSTB, SNF1LK, CAV1, MYO1E, B2M, NFIC, SYT6, RRM1, OAS1, IMPDH2, DMGDH, PNRC2, LIMS1, PARVG, FYN, LILRA2, FTL, SOCS1, PF4, ERG, IFIT1, NCOR2, IL16, TCIRG1, PITPNB, PABPC4, MAN2A1, SPN, TNFRSF8, RFX2, RGS13, LTA4H, S100A8, TCF3, TIAM1, CART, PPP2R2C, PIAS4, PRKCQ, NME2, SLC2A3, ATF4, IL2RG, COL3A1, PPM1D, SEC23A, LIMK2, BAT3, RGS10, STAT6, RASL12, CLQG, GPR18, NOTCH3, C1orf38, BTF3, CCL19, PES1, C1QA, ZNF593, TNF-a, POLD2, DTYMK, E2F1, STAU, IFNGR2, NRG1, TNFSF7, JARIDLA, BLR1, PLCL2, MKI67, IDUA, FEZ1, MAPKAPK5, DLC1, MAP4K2, VAV3, BATF, BIRC6, CEP2, DDAH2, PLK4, GTF2F2, FADS1, FHIT, SPOCK, TLK1, DDX5, NGFR, FYB, USP10, TCF7, RAMP1, AGPAT5, EDA, PPP3CC, HNRPK, TPR, CHUK, ANXA1, SMARCA4, CLK1, CCL3, CALM3, ALOX5, LCN2, NUP88, LKLF, AKT2, BIRC5, CALM1, CAMK2G, CaMKIINalpha, CLK1, GREG, DC-UbP, FAIM2, FOXL2, GATA2, GATA3, IL-7R, IRF1, KIT, KMO, CNTROB/LIP8, MAPK6, MAPKAPK3, PRKARI B, RAB11B, STMN1, STX1B2, STXBP5, GAS-7, XIAP, GADD45, DUSP1, PTEN, and SOCS2, a complement thereof, or a portion thereof.

[0099] “Homology” and “homologous” refers to sequence similarity between two peptides or two nucleic acid molecules. Homology can be determined by comparing each position in the aligned sequences. A degree of homology between nucleic acid or between amino acid sequences is a function of the number of identical or matching nucleotides or amino acids at positions shared by the sequences. As the term is used herein, a nucleic acid sequence is “homologous” to another sequence if the two sequences are substantially identical and the functional activity of the sequences is conserved (as used herein, the term ‘homologous’ does not infer evolutionary relatedness). Two nucleic acid sequences are considered “substantially identical” if, when optimally aligned (with gaps permitted), they share at least about 50% sequence similarity or identity, or if the sequences share defined functional motifs. In alternative embodiments, sequence similarity in optimally aligned substantially identical sequences may be at least 60%, 70%, 75%, 80%, 85%, 90% or 95%. As used herein, a given percentage of homology between sequences denotes the degree of sequence identity in optimally aligned sequences. An “unrelated” or “non-homologous” sequence shares less than 40% identity, though preferably less than about 25% identity, with any of the nucleic acids encoding the above-mentioned genes.

[0100] “Substantially complementary” nucleic acids are nucleic acids in which the complement of one molecule is substantially identical to the other molecule. Two nucleic acid or protein sequences are considered substantially identical if, when optimally aligned, they share at least about 70% sequence identity. In alternative embodiments, sequence identity may for example be at least 75%, at least 80%, at least 85%, at least 90%, or at least 95%. Optimal alignment of sequences for comparisons of identity may be conducted using a variety of algorithms, such as the local homology algorithm of Smith and Waterman, 1981, Adv. Appl. Math 2: 482, the homology alignment algorithm of Needleman and Wunsch, 1970, J. Mol. Biol. 48:443, the search for similarity method of Pearson and Lipman, 1988, Proc. Natl. Acad. Sci. USA 85: 2444, and the computerised implementations of these algorithms (such as GAP, BESTFIT, FASTA and TFASTA in the Wisconsin Genetics Software Package, Genetics Computer Group, Madison, Wis., U.S.A.). Sequence identity may also be determined using the BLAST algorithm, described in Altschul et al., 1990, J. Mol. Biol. 215:403-10 (using the published default settings). Software for performing BLAST analysis may be available through the National Center for Biotechnology Information (through the internet at www.ncbi.nlm.nih.gov). The BLAST algorithm involves first identifying high scoring sequence pairs (HSPs) by identifying short words of length W in the query sequence that either match or satisfy some positive-valued threshold score T when aligned with a word of the same length in a database sequence. T is referred to as the neighbourhood word score threshold. Initial neighbourhood word hits act as seeds for initiating searches to find longer HSPs. The word hits are extended in both directions along each sequence for as far as the cumulative alignment score can be increased. Extension of the word hits in each direction is halted when the following parameters are met: the cumulative alignment score falls off by the quantity X from its maximum achieved value; the cumulative score goes to zero or below, due to the accumulation of one or more negative-scoring residue alignments; or the end of either sequence is reached. The BLAST algorithm parameters W, T and X determine the sensitivity and speed of the alignment. The BLAST program may use as defaults a word length (W) of 11, the BLOSUM62 scoring matrix (Henikoff and Henikoff, 1992, Proc. Natl. Acad. Sci. USA 89: 10915-10919) alignments (B) of 50, expectation (E) of 10 (or 1 or 0.1 or 0.01 or 0.001 or 0.0001), M=5, N=4, and a comparison of both strands. One measure of the statistical similarity between two sequences using the BLAST algorithm is the smallest sum probability (P(N)), which provides an indication of the probability by which a match between two nucleotide or amino acid sequences would occur by chance. In alternative embodiments of the invention, nucleotide or amino acid sequences are considered substantially identical if the smallest sum probability in a comparison of the test sequences is less than about 1, preferably less than about 0.1, more preferably less than about 0.01, and most preferably less than about 0.001.

[0101] An alternative indication that two nucleic acid sequences are substantially complementary is that the two sequences hybridize to each other under moderately stringent, or preferably stringent, conditions. Hybridisation to filter-bound sequences under moderately stringent conditions may, for example, be performed in 0.5 M NaHPO₄, 7% sodium dodecyl sulfate (SDS), 1 mM EDTA at 65° C., and washing in 0.2×SSC/0.1% SDS at 42° C. (see Ausubel, et al. (eds), 1989, Current Protocols in Molecular Biology, Vol. 1, Green Publishing Associates, Inc., and John Wiley & Sons, Inc., New York, at p. 2.10.3). Alternatively, hybridization to filter-bound sequences under stringent conditions may, for example, be performed in 0.5 M NaHPO₄, 7% SDS, 1 mM EDTA at 65° C., and washing in 0.1×SSC/0.1% SDS at 68° C. (see Ausubel, et al. (eds), 1989, supra). Hybridization conditions may be modified in accordance with known methods depending on the sequence of interest (see Tijssen, 1993, Laboratory Techniques in Biochemistry and Molecular Biology—Hybridization with Nucleic Acid Probes, Part I, Chapter 2 “Overview of principles of hybridization and the strategy of nucleic acid probe assays”, Elsevier, N.Y.). Generally, stringent conditions are selected to be about 5° C. lower than the thermal melting point for the specific sequence at a defined ionic strength and pH.

[0102] In an embodiment, it is desirable to amplify the nucleic acid sample prior to hybridization. One of skill in the art will appreciate that whatever amplification method is used, if a quantitative result is desired, a method is used that maintains or controls for the relative frequencies of the amplified nucleic acids to achieve quantitative amplification. Methods of “quantitative” amplification are well known to those of skill in the art. For example, quantitative PCR involves simultaneously co-amplifying a known quantity of a control sequence using the same primers. This provides an internal standard that may be used to calibrate the PCR reaction. The high-density array may then include probes specific to the internal standard for quantification of the amplified nucleic acid. Other suitable amplification methods include, but are not limited to polymerase chain reaction (PCR) Innis, et al., PCR Protocols. A guide to Methods and Application. Academic Press, Inc. San Diego, (1990)), ligase chain reaction (LCR) (see Wu and Wallace, Genomics, 4: 560, Landegren, et al., Science, 241: 1077 and Barringer, et al., Gene, 89: 117), transcription amplification (Kwoh, et al., Proc. Natl. Acad. Sci. USA, 86: 1173), and self-sustained sequence replication (Guatelli, et al, Proc. Nat. Acad. Sci. USA, 87: 1874).

[0103] Another embodiment of the present invention relates to one or more polynucleotide probes for the detection of the expression of genes that are associated with memory T cell survival.

[0104] A “probe” is meant to include a nucleic acid oligomer that hybridizes specifically to a target sequence in a nucleic acid or its complement, under conditions that promote hybridization, thereby allowing detection of the target sequence or its amplified nucleic acid. Detection may either be direct (i.e, resulting from a probe hybridizing directly to the target or amplified sequence) or indirect (i.e., resulting from a probe hybridizing to an intermediate molecular structure that links the probe to the target or amplified sequence). A probe's “target” generally refers to a sequence within an amplified nucleic acid sequence (i.e., a subset of the amplified sequence) that hybridizes specifically to at least a portion of the probe sequence by standard hydrogen bonding or “base pairing.” Sequences that are “sufficiently complementary” allow stable hybridization of a probe sequence to a target sequence, even if the two sequences are not completely complementary. A probe may be labeled or unlabeled.

[0105] The polynucleotide probe(s) of the invention comprise, consist(s) of, or consist(s) essentially of, one or more polynucleotide probes that are complementary to RNA transcripts, or nucleotides derived therefrom, of at least one nucleic acid sequence that has been identified herein as being differentially expressed in T_{CM}, and is therefore distinguished from previously known nucleic acid arrays and primer sets. The plurality of polynucleotides within the above-limitation includes at least one or more polynucleotide probes (e.g., at least 1, 2, 3, 4, 5, 6, and so on, in whole integer increments, up to the maximum number of possible probes) that are complementary to RNA transcripts, or nucleotides derived therefrom, of at least one gene, and preferably, at least 2 or more genes identified by the present inventors. Such genes are selected from any of the genes listed in the tables provided herein and can include any number of genes, in whole integers (e.g., 1, 2, 3, 4, . . . ). Multiple probes can also be used to detect the same gene or to detect different splice variants of the same gene. In an aspect, each of the polynucleotides is at least 5 nucleotides in length. In an aspect, the polynucleotide probe(s) consist(s) of at least one polynucleotide probes, wherein each polynucleotide probe is at least 5 nucleotides in length, and wherein each polynucleotide probe is complementary to an RNA transcript, or nucleotide derived therefrom, of a gene selected from the group consisting HLA-G, MAL, NGFRAP1, HRMT1L2, ATXN3, TNFRSF7 (CD27), ING1, E2F4, RELA, TOSO, INDO, SFRP4, PABPC1, ARL7, PIM2, TAP1, CD37, LPPR4, IMPDH2, LOC112476, TGFBR2, CCNL1, GRK5, Stat5a, RALA, CSTB, SNF1LK, CAV1, MYO1E, B2M, NFIC, SYT6, RRM1, OAS1, IMPDH2, DMGDH, PNRC2, LIMS1, PARVG, FYN, LILRA2, FTL, SOCS1, PF4, ERG, IFIT1, NCOR2, IL16, TCIRG1, PITPNB, PABPC4, MAN2A1, SPN, TNFRSF8, RFX2, RGS13, LTA4H, S100A8, TCF3, TIAM1, CART, PPP2R2C, PIAS4, PRKCQ, NME2, SLC2A3, ATF4, IL2RG, COL3A1, PPM1D, SEC23A, LIMK2, BAT3, RGS10, STAT6, RASL12, CLQG, GPR18, NOTCH3, C1orf38, BTF3, CCL19, PES1, C1QA, ZNF593, TNF-a, POLD2, DTYMK, E2F1, STAU, IFNGR2, NRG1, TNFSF7, JARIDLA, BLR1, PLCL2, MKI67, IDUA, FEZ1, MAPKAPK5, DLC1, MAP4K2, VAV3, BATF, BIRC6, CEP2, DDAH2, PLK4, GTF2F2, FADS1, FHIT, SPOCK, TLK1, DDX5, NGFR, FYB, USP10, TCF7, RAMP1, AGPAT5, EDA, PPP3CC, HNRPK, TPR, CHUK, ANXA1, SMARCA4, CLK1, CCL3, CALM3, ALOX5, LCN2, NUP88, LKLF, AKT2, BIRC5, CALM1, CAMK2G, CaMKIINalpha, CLK1, GREG, DC-UbP, FAIM2, FOXL2, GATA2, GATA3, IL-7R, IRF1, KIT, KMO, CNTROB/LIP8, MAPK6, MAPKAPK3, PRKARI B, RAB11B, STMN1, STX1B2, STXBP5, GAS-7, XIAP, GADD45, DUSP1, PTEN, and SOCS2. In another aspect, the polynucleotide probe(s) comprise(s) polynucleotides that are complementary to an RNA transcript, or a nucleotide derived therefrom, of at least two genes mentioned above. In another aspect, the polynucleotide probe(s) comprises polynucleotide probes that are complementary to an RNA transcript, or a nucleotide derived therefrom, of at least five genes, at least 10 genes, at least 25 genes, at least 50 genes, or up to all of the genes mentioned above.

[0106] In accordance with the present invention, an isolated polynucleotide, or an isolated nucleic acid molecule, is a nucleic acid molecule that has been removed from its natural milieu (i.e., that has been subject to human manipulation), its natural milieu being the genome or chromosome in which the nucleic acid molecule is found in nature. As such, “isolated” does not necessarily reflect the extent to which the nucleic acid molecule has been purified, but indicates that the molecule does not include an entire genome or an entire chromosome in which the nucleic acid molecule is found in nature. The polynucleotides useful in the polynucleotide probes of the present invention are typically a portion of a gene (sense or non-sense strand) of the present invention that is suitable for use as a hybridization probe or PCR primer for the identification of a full-length gene (or portion thereof) in a given sample (e.g., a peripheral blood cell sample). An isolated nucleic acid molecule can include a gene or a portion of a gene (e.g., the regulatory region or promoter), for example, to produce a reporter construct according to the present invention. An isolated nucleic acid molecule that includes a gene is not a fragment of a chromosome that includes such gene, but rather includes the coding region and regulatory regions associated with the gene, but no additional genes naturally found on the same chromosome. An isolated nucleic acid molecule can also include a specified nucleic acid sequence flanked by (i.e., at the 5′ and/or the 3′ end of the sequence) additional nucleic acids that do not normally flank the specified nucleic acid sequence in nature (i.e., heterologous sequences). Isolated nucleic acid molecule can include DNA, RNA (e.g., mRNA), or derivatives of either DNA or RNA (e.g., cDNA). Although the phrase “nucleic acid molecule” primarily refers to the physical nucleic acid molecule and the phrase “nucleic acid sequence” primarily refers to the sequence of nucleotides on the nucleic acid molecule, the two phrases can be used interchangeably, especially with respect to a nucleic acid molecule, or a nucleic acid sequence, being capable of encoding a protein. Preferably, an isolated nucleic acid molecule of the present invention is produced using recombinant DNA technology (e.g., polymerase chain reaction (PCR) amplification, cloning) or chemical synthesis.

[0107] The minimum size of a nucleic acid molecule or polynucleotide of the present invention is a size sufficient to form a probe or oligonucleotide primer that is capable of forming a stable hybrid with the complementary sequence of a nucleic acid molecule encoding the natural protein (e.g., under moderately stringent, or stringent conditions) (e.g. incubation at 65° C. in DIG Easy Hyb solution (Roche), 50 μg of yeast tRNA and 50 μg of calf thymus DNA) or to otherwise be used as a target in an assay or in any therapeutic method discussed herein. If the polynucleotide is an oligonucleotide probe or primer, the size of the polynucleotide can be dependent on nucleic acid composition and percent homology or identity between the nucleic acid molecule and a complementary sequence as well as upon hybridization conditions per se (e.g., temperature, salt concentration, and formamide concentration). The minimum size of a polynucleotide that is used as an oligonucleotide probe or primer is at least about 5 nucleotides in length, and preferably ranges from about 5 to about 50 or about 500 nucleotides or greater (1000, 2000, etc.), including any length in between, in whole number increments (i.e., 5, 6, 7, 8, 9, 10, . . . 33, 34, . . . 256, 257, . . . 500 . . . 1000 . . . ), and more preferably from about 10 to about 40 nucleotides, and most preferably from about 15 to about 40 nucleotides in length. There is no limit, other than a practical limit, on the maximal size of a nucleic acid molecule of the present invention, in that the nucleic acid molecule can include a portion of a protein-encoding sequence or a nucleic acid sequence encoding a full-length protein.

[0108] In an embodiment, the polynucleotide probes are conjugated to detectable markers. Detectable labels suitable for use in the present invention include any composition detectable by spectroscopic, photochemical, biochemical, immunochemical, electrical, optical or chemical means. Useful labels in the present invention include biotin for staining with labeled streptavidin or avidin conjugate, magnetic beads (e.g., Dynabeads™), fluorescent dyes (e.g., fluorescein, texas red, rhodamine, green fluorescent protein, and the like), radiolabels (e.g., ³H, ¹²⁵I, ³⁵S, ¹⁴C, or ³²P), enzymes (e.g., horse radish peroxidase, alkaline phosphatase and others commonly used in an ELISA), and colorimetric labels such as colloidal gold or colored glass or plastic (e.g., polystyrene, polypropylene, latex, etc.) beads. Preferably, the polynucleotide probes are immobilized on a substrate.

[0109] In one embodiment, the polynucleotide probes are hybridizable array elements in a microarray or high density array. Nucleic acid arrays are well known in the art and are described for use in comparing expression levels of particular genes of interest, for example, in U.S. Pat. No. 6,177,248, which is incorporated herein by reference in its entirety. Nucleic acid arrays are suitable for quantifying small variations in expression levels of a gene in the presence of a large population of heterogeneous nucleic acids. Knowing the identity of the genes set forth by the present invention, nucleic acid arrays can be fabricated either by de novo synthesis on a substrate or by spotting or transporting nucleic acid sequences onto specific locations of substrate. Nucleic acids are purified and/or isolated from biological materials, such as a bacterial plasmid containing a cloned segment of sequence of interest. It is noted that all of the genes identified by the present invention have been previously sequenced, at least in part, such that oligonucleotides suitable for the identification of such nucleic acids can be produced. The database accession number for each of the genes identified by the present inventors is provided in the tables of the invention. Suitable nucleic acids are also produced by amplification of template, such as by polymerase chain reaction or in vitro transcription.

[0110] One of skill in the art will appreciate that an enormous number of array designs are suitable for the practice of this invention. An array will typically include a number of probes that specifically hybridize to the sequences of interest. In addition, in a preferred embodiment, the array will include one or more control probes. The high-density array chip includes “test probes”. Test probes could be oligonucleotides having a minimum or maximum length as described above for other oligonucleotides. In another embodiment, test probes are double or single strand DNA sequences. DNA sequences are isolated or cloned from natural sources or amplified from natural sources using natural nucleic acids as templates, or produced synthetically. These probes have sequences complementary to particular subsequences of the genes whose expression they are designed to detect. Thus, the test probes are capable of specifically hybridizing to the target nucleic acid they are to detect.

[0111] Another embodiment of the present invention relates to reagents which specifically binds with the polypeptide, such as chemical agents, or natural products, or antibodies, or antigen binding fragments thereof, for the detection of the expression of genes differentially expressed in T_{CM}. The reagent consists of chemical agents, or natural products, or antibodies, or antigen binding fragments thereof, that selectively bind to proteins encoded by genes that are regulated in biological samples from transplant donors, and that can be detected as protein products using antibodies. In addition, the reagent comprises chemical agents, or natural products, or antibodies, or antigen binding fragments thereof, that selectively bind to proteins or portions thereof (peptides) encoded by one or more genes selected from HLA-G, MAL, NGFRAP1, HRMT1L2, ATXN3, TNFRSF7 (CD27), ING1, E2F4, RELA, TOSO, INDO, SFRP4, PABPC1, ARL7, PIM2, TAP1, CD37, LPPR4, IMPDH2, LOC112476, TGFBR2, CCNL1, GRK5, Stat5a, RALA, CSTB, SNF1LK, CAV1, MYO1E, B2M, NFIC, SYT6, RRM1, OAS1, IMPDH2, DMGDH, PNRC2, LIMS1, PARVG, FYN, LILRA2, FTL, SOCS1, PF4, ERG, IFIT1, NCOR2, IL16, TCIRG1, PITPNB, PABPC4, MAN2A1, SPN, TNFRSF8, RFX2, RGS13, LTA4H, S100A8, TCF3, TIAM1, CART, PPP2R2C, PIAS4, PRKCQ, NME2, SLC2A3, ATF4, IL2RG, COL3A1, PPM1D, SEC23A, LIMK2, BAT3, RGS10, STAT6, RASL12, CLQG, GPR18, NOTCH3, C1orf38, BTF3, CCL19, PES1, C1QA, ZNF593, TNF-a, POLD2, DTYMK, E2F1, STAU, IFNGR2, NRG1, TNFSF7, JARIDLA, BLR1, PLCL2, MKI67, IDUA, FEZ1, MAPKAPK5, DLC1, MAP4K2, VAV3, BATF, BIRC6, CEP2, DDAH2, PLK4, GTF2F2, FADS1, FHIT, SPOCK, TLK1, DDX5, NGFR, FYB, USP10, TCF7, RAMP1, AGPAT5, EDA, PPP3CC, HNRPK, TPR, CHUK, ANXA1, SMARCA4, CLK1, CCL3, CALM3, ALOX5, LCN2, NUP88, LKLF, AKT2, BIRC5, CALM1, CAMK2G, CaMKIINalpha, CLK1, GREG, DC-UbP, FAIM2, FOXL2, GATA2, GATA3, IL-7R, IRF1, KIT, KMO, CNTROB/LIP8, MAPK6, MAPKAPK3, PRKARI B, RAB11B, STMN1, STX1B2, STXBP5, GAS-7, XIAP, GADD45, DUSP1, PTEN, and SOCS2. In an aspect, the reagent consists of one or more antibodies, antigen binding fragments thereof, or antigen binding peptides, each of which selectively binds to a protein encoded by one or more of the above-mentioned genes.

[0112] According to the present invention, the phrase “selectively binds to” refers to the ability of a chemical agent, a natural product, an antibody, antigen binding fragment or binding partner (antigen binding peptide) to preferentially bind to specified proteins. More specifically, the phrase “selectively binds” refers to the specific binding of one protein to another molecule (e.g., chemical agent, natural product, an antibody, fragment thereof, or binding partner to an antigen), wherein the level of binding, as measured by any standard assay (e.g., an immunoassay, fluorescence), is statistically significantly higher than the background control for the assay. For example, when performing an immunoassay, controls typically include a reaction well/tube that contain chemical agent, natural product, antibody or antigen binding fragment alone (i.e., in the absence of antigen), wherein an amount of reactivity (e.g., non-specific binding to the well) by the chemical agent, natural product, antibody or antigen binding fragment thereof in the absence of the antigen is considered to be background. Binding can be measured using a variety of methods standard in the art including enzyme immunoassays (e.g., fluorescence, ELISA, immunoblot assays, etc.).

[0113] Isolated antibodies of the present invention can include serum containing such antibodies, or antibodies that have been purified to varying degrees. Whole antibodies of the present invention can be polyclonal or monoclonal. Alternatively, functional equivalents of whole antibodies, such as antigen binding fragments in which one or more antibody domains are truncated or absent (e.g., Fv, Fab, Fab′, or F(ab)₂ fragments), as well as genetically-engineered antibodies or antigen binding fragments thereof, including single chain antibodies or antibodies that can bind to more than one epitope (e.g., bi-specific antibodies), or antibodies that can bind to one or more different antigens (e.g., bi- or multi-specific antibodies), may also be employed in the invention.

[0114] Generally, in the production of an antibody, a suitable experimental animal, such as, for example, but not limited to, a rabbit, a sheep, a hamster, a guinea pig, a mouse, a rat, or a chicken, is exposed to an antigen against which an antibody is desired. Typically, an animal is immunized with an effective amount of antigen that is injected into the animal. An effective amount of antigen refers to an amount needed to induce antibody production by the animal. The animal's immune system is then allowed to respond over a pre-determined period of time. The immunization process can be repeated until the immune system is found to be producing antibodies to the antigen. In order to obtain polyclonal antibodies specific for the antigen, serum is collected from the animal that contains the desired antibodies (or in the case of a chicken, antibody can be collected from the eggs). Such serum is useful as a reagent. Polyclonal antibodies can be further purified from the serum (or eggs) by, for example, treating the serum with ammonium sulfate.

[0115] For diagnostic applications, the reagent (i.e., the antibodies or antigen binding fragments thereof) is either in a free state or immobilized on a solid support, such as a tube, a bead, a microarray or any other conventional support used in the field. Immobilization is achieved using direct or indirect means. Direct means include passive adsorption (non-covalent binding) or covalent binding between the support and the reagent. By “indirect means” is meant that an anti-reagent compound that interacts with a reagent is first attached to the solid support. Indirect means may also employ a ligand-receptor system, for example, where a molecule such as a vitamin is grafted onto the reagent and the corresponding receptor immobilized on the solid phase. This is illustrated by the biotin-streptavidin system. Alternatively, a peptide tail is added chemically or by genetic engineering to the reagent and the grafted or fused product immobilized by passive adsorption or covalent linkage of the peptide tail.

[0116] Such diagnostic agents may be included in a kit which also comprises instructions for use. The reagent is labeled with a detection means which allows for the detection of the reagent when it is bound to its target. The detection means may be a fluorescent agent such as fluorescein isocyanate or fluorescein isothiocyanate, or an enzyme such as horseradish peroxidase or luciferase or alkaline phosphatase, or a radioactive element such as ¹²⁵I or ⁵¹Cr.

[0117] The invention also features kits for assessing the efficacy of a vaccine or a treatment at inducing/maintaining T_{CM} and/or a protective immune response in a subject. The kits can include reagents for evaluating the expression or activity of nucleic acids (e.g., mRNAs) or proteins that play a role in the induction and/or maintenance of T_{CM}. Kits for evaluating expression of nucleic acids can include, for example, probes or primers that specifically bind a nucleic acid of interest (e.g., a nucleic acid, the expression of which correlates with the presence or absence of T_{CM} in a sample). The kits for evaluating nucleic acid expression can provide substances useful as standard (e.g., a sample containing a known quantity of a nucleic acid to which test results can be compared, with which one can assess factors that may alter the readout of a diagnostic test, such as variations in an enzyme activity or binding conditions). Kits for assessing nucleic acid expression can further include other reagents useful in assessing levels of expression of a nucleic acid (e.g., buffers and other reagents for performing PCR reactions, or for detecting binding of a probe to a nucleic acid). In addition to, or as an alternative, kits can include reagents for detecting proteins (e.g., antibodies). The kits can provide instructions for performing the assay used to evaluate gene expression instructions for determining risk based on the results of the assay. For example, the instructions can indicate that levels of expression of a gene of interest (e.g., relative to a standard or a control), correlate with the presence or absence of T_{CM}. Kits can also provide instructions, containers, and other reagents for obtaining and processing samples for analysis.

[0118] The invention further provides methods for developing personalized treatment plans. Information gained by way of the methods described above can be used to develop a personalized treatment plan for a subject (for example, a vaccinated or an immunodeficient subject). The methods can be carried out by, for example, using any of the methods of gene analysis described above and, in consideration of the results obtained, designing a treatment plan or a clinical course of action for the subject. If the levels of gene expression indicate that the subject has low levels of T_{CM}, the subject is a candidate for vaccination and/or treatment with an effective amount of immuno-stimulating agent. Depending on the level of gene expression or the gene expression profile, the recipient may require a treatment regime that is more or less aggressive than a standard regime, or it may be determined that the recipient is best suited for a standard regime. When so treated, one can treat or prevent complications associated with poor immune response. Conversely, a different result (i.e., a different level of expression of certain genes) may indicate that the subject has high levels of T_{CM} and/or shows immune protection and is not likely to experience an undesirable clinical outcome (e.g. being at risk of infection). In that event, the patient may avoid vaccination and/or treatment with immuno-stimulating agents (or require a less aggressive regime) and their associated side effects.

[0119] In embodiments, the herein-mentioned animal is a mammal, such as a human. With regard to for example screening assays, accepted laboratory animal model systems may be used, for example rodent systems (e.g., mouse, rat, ferret), rabbit, non-human primates, as well as others known in the art.

[0120] The present invention is illustrated in further details by the following non-limiting examples.

### EXAMPLES

### Example 1

### Material and Methods

[0121] Reagents and Abs. Recombinant human IL-2 was obtained trough the AIDS reagent depository at the NIH. IL-7 and IL-4 were purchased from R&D systems. The kinase inhibitors AKT-IV, STO-069, U0126 and Wedelolactone were obtained from Calbiochem. Etoposide was purchased from Sigma-Aldrich. CH11, Anti-Fas agonist antibodies, were obtained from Immunotech. All antibodies for flow cytometry were purchased from BD PharMingen, except for anti-CD45RA-ECD from Beckman Coulter and anti-CCR7-FITC from R&D systems. Anti-pFOXO3a S253, anti-pFOXO3a T32, anti-pan FOXO3a, anti-Bim, anti-PIM-1, anti-pGab2 T452, anti-pIKKα/β S176/180 and anti-pAKT S473-alexa 488 were purchased from Cell Signaling Technology Inc., anti-FasL (5G51) from Alexis Biochemical, anti-P130 (clone KAB40) from Sigma, anti-Gadd45a from Chemicon, and anti-PIM-2 and anti-pFOXO3a S315 were a gift from BD-PharMingen. HRP-conjugated goat anti-mouse and goat anti-rabbit IgG antibodies were obtained from BioRad Laboratories. Anti-Rab-27a is a home-made antibody raised in rabbits against a GST-Rab27 fusion protein.

[0122] Isolation of CD4⁺ T cell sub-populations. PBMCs from healthy subjects were isolated by a Ficoll-HyPaque (Pharmacia) density gradient. All donors signed informed consent forms approved by the CHEST hospital review board and the CR-CHUM. We first enriched for CD4⁺ T cells using negative immunomagnetic bead selection (AutoMACS™, Myltenii). Cells were then labeled with anti-CD4-APC-cy7, anti-CD45RA-ECD, anti-CD27-FITC and anti-CCR7-PE-cy7 and sorted into Naïve, T_{CM} and T_{EM}. Sorting was performed using a BDAria™ flow cytometer (BD Biosciences). The purity of the T_{CM} and T_{EM} sub-populations ranged from 96 to 99%. All procedures were done at 4° C. to minimize any changes in cell phenotype or gene expression.

[0123] RNA isolation, amplification and microarray hybridization. Sample RNA was extracted using an RNA extraction kit (Qiagen), then amplified using the MessageAmp RNA kit (Ambion) following the manufacturer's instructions. The amplified RNA (aRNA) was then verified for quality and quantity using the Agilent Bioanalyser and measuring the OD. For reverse transcription, 10-20 μg of total RNA or 0.1-0.5 μg of mRNA was mixed on ice with the following (total volume 40 μL): 8.0 μL 5× First Strand reaction buffer (Superscript II, Invitrogen), 1.5 μL AncT primer (5′-T20VN, 100 pmol/μl), 3.0 μL dNTP-dCTP (6.67 mM each of dATP, dGTP, dTTP), 1.0 μL 2 mM dCTP, 1.0 μL 1 mM Cyanine 3 or Cyanine 5-dCTP (NEN), 4.0 μL 0.1 M DTT, 1.0-5.0 ng Control RNA (artificial Arabadopsis transcripts) and nuclease-free water (up to a total volume of 40 μL). The mixture was incubated in the dark at 65° C. for 5 minutes, then at 42° C. for 5 minutes. 2 μL of reverse transcriptase (SuperScript II, Invitrogen) was added and the incubation was continued at 42° C. for 2 hours. To stop the reaction, the mixture was briefly centrifuge and place on ice. 4 μL of 50 mM EDTA (pH 8.0) and 2 μL of 10 N NaOH were added, followed by an incubation at 65° C. for 20 minutes to hydrolyse the RNA. 4 μL of 5 M acetic acid was then added. The labeled cDNA was then purified using CyScribe™ GFX™ purification columns (Amersham) according to the manufacturer's protocol. Following purification, the volume was reduced to 5 μL by evaporation using a SpeedVac® system. For hybridization, a hybridization solution was prepared according to the following: for each 100 μL of DIG Easy Hyb solution (Roche), 5 μL of yeast tRNA (Invitrogen; 10 mg/ml) and 5 μL of calf thymus DNA was added. The hybridization solution was then incubated at 65° C. for 2 minutes and cool to room temperature. The labeled cDNA sample was then incubated in 80 μL of hybridization solution at 65° C. for 2 minutes and cool to room temperature. The hybridization mixture was then pipetted directly onto a coverslip and the slide (UltraGAPS™ slides, Corning Inc.) “array-side” was put down on top of the coverslip. The human 19k cDNA array (Microarray Centre, University Health Network, Toronto, Canada), a single-spotted array containing 19,008 characterised and unknown human ESTs, was used for the studies presented herein. The slides were then put in hybridization chambers and incubated for 12-16 hours at 37° C. For washing, the coverslip were quickly but gently dipping the array in 1×SSC, and the slides were placed into a staining rack and into a staining dish (Evergreen Scientific through Diamed cat# E/S258-4100-000) with fresh 1×SSC. The slides were washed for 3 sets of 15 minutes each at 50° C. in clean slide staining boxes containing pre-warmed (at 50° C.) 1×SSC/0.1% SDS solution with gentle occasional agitation. After the washes were completed, the slides were rinsed twice in room temperature 1×SSC (plunging 4-6 times) and then in 0.1×SSC. The slides were then spinned dry at 600 rpm for 5 minutes in a slide box lined with Whatman® paper (Whatman, UK) and scanned. Experimental design, sample description and preparations, hybridizations, data analysis and annotations meet MIAME compliance.

[0124] Microarray data preprocessing. Microarrays were scanned at 16 bits using the ScanArray Express Scanner T (Packard Bioscience) at 10-μm resolution at 635 (R) and 532 (G) nm wavelengths for cy-5 and cy-3 respectively to produce image (tiff) files that were quantified using Genepix Pro™ 6.0 image analysis software (Molecular Devices Corporation). Bad spots were flagged manually according to their morphologies. The results were saved as Quantarray™ files (QAF), where the intensity values ranged from 0 to 216-1 (65535) units. The tiff and QAF files were compressed and archived for permanent storage and further analysis. The microarrays were then screened for quality, first by visual inspection of the array with flagging of poor quality spots, and second with automated scripts that scanned the quantified output files and measured overall density distribution on each channel and number of flagged spots. Box-plots, MA-plots, and density distribution plots were drawn and inspected. Each quantified output file was run though the following pre-processing steps using the R language and environment (http://www.r-project.org, Wit et al., 2004. Statistics for Microarrays: Design, Analysis and Inference. John Wiley and Sons Ltd, England. 1-265 pp.—Dalgaard, 2002. Introductory Statistics, R. Springer. 1-288 pp.; Maindonald et al., 2003. Data Analysis and Graphics, R. Cambridge University Press, Cambridge. 1-362 pp.; Everitt et al., 2006. A Handbook of Statistical Analyses, R. Chapman & Hall/CRC, Boca Raton, Fla. 1-304 pp.) and the Limma package (Smyth, Bioinformatics and Computational Biology Solutions using R and Bioconductor, 397-420). For minimum intensity filtering, R and G values were treated with a surrogate replacement policy for estimating sub-threshold values. For normalization within arrays, the raw merged R and G channels were lowess-normalized (grouped by print-tip) and transformed to log 2 ratios (Smyth, supra; and Fukunaga, Introduction to statistical pattern recognition, 1-592). The commensurability of average brightness between the arrays of a pool of arrays was then assured using zero-centering of log-distributions normalization. When both duplicate spots of a clone (gene) passed quality control, the average profile of the replicate clones was calculated and used as the representative profile for that gene. If only one of the clone duplicate spots passed quality control, only that profile was used in the downstream analysis. All data were then represented as log 10 (Red/Green) expression ratios for further analysis.

[0125] Selection of top 100 T_{CM}/T_{EM} discriminating genes. From the set of 19k microarray genes that passed QC criteria during preprocessing of microarray data, we retained only the genes for further analysis with T_{CM}/T_{EM} discriminating F-test p-values<0.01. From this set, a final subset of 100 genes was further manually selected according to known functions and pathways including apoptosis, cell cycle and signaling.

[0126] Principal Components Analysis (PCA). A data matrix comprising 13 T_{CM} and 13 T_{EM} samples (rows), and 100 “top” T_{CM}/T_{EM} discriminating genes (see above) was constructed. Using singular value decomposition of the data matrix, a standard PCA of the data's 100×100 covariance matrix was computed, each sample comprising 100 genes. PCA computed and plot generated by Ref GeneLinker Platinum™ V4.6 (Improved Outcomes Software Inc, Ontario, Canada).

[0127] Two-way hierarchical clustering. Hierarchical clustering was carried out over the same set of 26 samples and 100 genes as used for PCA. We used Pearson correlation as the similarity measure between genes and samples for clustering. Analyses were performed using GeneLinker Platinum™ V4.6 software.

[0128] Quantitative real-time PCR analysis. Changes in gene expression observed by array analyses were verified by low-density array performed on an Applied Biosystems detection system (Foster City, Calif.). Briefly, cDNA was synthesized from total RNA (1 μg per sample, n=4) in a reverse transcriptase (RT) reaction in 20 μl of 1× first-strand synthesis buffer (Invitrogen). Amplification of cDNA ( 1/20) was performed using SYBR Green PCR buffer (Perkin-Elmer, Wellesley, MA), containing 0.1 μM of specific primers. Before the samples were analyzed, standard curves of purified, target-specific amplicons were created. The mRNA expression for each gene was determined by comparing it with its respective standard curve. This measurement was controlled for RNA quality, quantity, and RT efficiency by normalizing it to the expression level of the GAPDH gene. Statistical significance was determined by use of normalized fold changes and ANOVA. The p-values were calculated using a two-tailed T-test, and assuming that the true variances were unknown.

[0129] Induction and quantification of apoptosis. Sorted cells were cultured in complete RPMI and then treated as indicated in the figure legends. Apoptotic cells were detected using annexin-V labeling according to the manufacturer's protocol (Biosource). The fluorescence signals were measured by flow cytometry using a BD LSRI flow cytometer (BD-Biosciences). Approximately 50,000-gated events were collected for each sample.

[0130] Western Blotting analysis. T_{CM} and T_{EM} were sorted as described above. Cells were washed twice with PBS and re-suspended in lysis buffer containing 50 mM NaF and 1 mM sodium pyrophosphate. Proteins from total cell extracts (10 μg) were separated on SDS-PAGE and electrotransfered onto PVDF membranes (Roche, Indianapolis, Ind.). Membranes were incubated overnight at 4° C. with specific antibodies as described in the figure legends. Detection of the immune complexes was performed using horseradish peroxidase (HRP)-conjugated goat anti-mouse (1:2500) or goat anti-rabbit IgG antibodies (1:3000). HRP activity was detected using an enhanced chemiluminescence detection procedure (ECL-plus detection system, Amersham Biosciences). Membranes were subsequently stripped and restained with an anti-actin Abs (1:10000). The expression level of actin was used to control for equal loading. Protein expression levels were expressed as a percentage of the highest signals obtained.

[0131] Intracellular staining. The cells were labeled with anti-CD4-Amcyan, anti-CD27-PB, anti-CD45RA-APCcy7 for 20 min at 4 degrees. The cells were fixed in 2% PFA for 15 min at RT and then incubated with anti-GrB-Alexa700, anti-Perforin-FITC or Anti-FASL-PE for 20 min at RT in 0.5% saponin (in PBS). Analysis was performed on gated-T_{CM} and -T_{EM}. Around 20,000-gated events were collected on a BD LSRII flow cytometer (BD-Biosciences).

[0132] Proliferation assay. Sorted T_{CM} or T_{EM} were co-cultured with mature autologous dendritic cells (mDC) (ratio T/DC:40/1) in the presence of SEA (50 ng/ml) as previously described (Younes et al., 2003. J. Exp. Med. 198(12):1909-22.). After 1 to 15 days of co-culture, cells were labeled with anti-CD4 and anti-TCRVβ22. For the analysis, cells were gated on 4⁺ T cells and approximately 150,000-gated events were collected on a LSRII cytometer.

[0133] Flow cytometry analysis of STAT5a and AKT phosphorylation status. PBMCs were resuspended at 20 millions/ml in RPMI and incubated for 30 min in the presence of CCR7-FITC abs (20 μl/million cells) at room temperature. The cells were then washed and re-suspended at a cell concentration of 5 millions per ml in PBS and stimulated for 15 min at 37° C. in the presence of IL-2 (100 U/ml) or IL-7 (10 ng/ml). Following stimulation, the cells were fixed for 10 min at 37 degrees using cytofix buffer (BD Biosciences), pelleted and then permeabilized in PERM-III buffer (BD Biosciences) for 30 min on ice. The cells were then washed twice in Staining buffer (BD Biosciences) and rehydrated for 30 min on ice in the staining buffer. Cells were then labeled with anti-CD4-APCcy7, anti-CD45RA-ECD, anti-CD27-PE and anti-pSTAT5a (Y694)-Alexa647 specific antibodies for 30 min at room temperature. For the analysis, the cells were gated on T_{CM} and T_{EM}. An average of 20,000-gated events was collected on LSRII cytometer. For CD28 cross-linking, the cells were re-suspended at 10 million/ml in the presence of CD28 (2 μg/ml) for 30 min on ice. The cells were then washed twice in PBS and subsequently stimulated by cross-linking with rabbit anti-mouse Igs (20 μg/ml) (Biosource) in 25 μl pre-warmed medium for 15 min. The cells were then fixed and permeabilized as described above and labeled with CD4-APCcy7, CD45RA-ECD, CD27-PE, pAKT S473-Alexa 488. Flow cytometry analysis was performed on gated T_{CM} and T_{EM}. Around 20,000-gated events were collected on a BD LSRII cytometer.

### Example 2

### Functional and Phenotypic Characterization of CD4⁺ T_{CM} and T_{EM}

[0134] Memory T cell subsets were sorted by flow cytometry from whole PBMC isolated from 13 healthy donors based on CD45RA, CD27 and CCR7 expression. Naïve cells are characterized as CD45RA+, CD27+ and CCR7+; T_{CM} cells (Central Memory) have the following phenotype: CD45RA−, CD27+ and CCR7+, and T_{TM} cells (“Transitory” Memory) are CD45RA−, CD27+ and CCR7−; while T_{EM} cells (Effector Memory) are defined by the lack of expression of these three markers (CD45RA−, CD27− and CCR7−) (Seder, R. A., and R. Ahmed. 2003. Nat Immunol 4:835-842) (FIG. 1A). All T_{CM} (>95%) expressed CD28, CD62L and CD95 (Fas). T_{EM} were also homogeneously CD28+ and CD95+, albeit only 30-40% expressed CD62L (data not shown). The ex-vivo sorted T_{EM} subpopulation expressed the effector cytotoxic molecules Granzyme B and perforin, while these two molecules were undetectable in T_{CM} (FIG. 1B). T_{EM} also showed higher (threefold) expression levels of Rab27a, a molecule involved in degranulation and cytotoxic effector function (15), than T_{CM} (FIG. 1C). Taken together, these results show that T_{EM} are functionally and phenotypically more differentiated than T_{CM}.

### Example 3

### T_{CM} CD4⁺ T Cells are resistant to Fas-Induced Apoptosis and Show enhanced proliferation capacity following Stimulation with Mature Dendritic Cells

[0135] We next determined the sensitivity to apoptosis of T_{CM} and T_{EM}. T_{CM} and T_{EM} sorted cells were cultured in the presence or absence of anti-Fas antibodies or etoposide for 24 hours (n=3). Annexin-V labeling showed a significant difference (p<0.007) in the capacity of T_{CM} to resist Fas-mediated apoptosis as compared to T_{EM} (FIG. 1D). Of note, T_{CM} cells are less prone to undergo spontaneous apoptosis (i.e., without any apoptotic inducers) (p<0.02) than the T_{EM} subset (FIG. 1D). Moreover, in response to etoposide, used as a non-specific apoptotic inducer, both T_{CM} and T_{EM} present similar sensitivity to apoptosis, thereby confirming that the apoptotic machinery is intact in both cell types. We also determined the capacity of purified T_{CM} and T_{EM} to proliferate and persist in a 15-day culture assay after stimulation with SEA-pulsed mature dendritic cells. Proliferation was determined by quantifying the expansion of the SEA-responsive TCRVβ22+ T cells. T_{CM} present a better expansion potential and can persist longer than T_{EM}, as demonstrated by a tenfold increase in the absolute number of SEA-responsive TCRVβ22+T cells in a 15-day culture period (FIG. 1E). Similar data were also generated using CFSE whereby T_{CM} undergo several more rounds of proliferation when compared to T_{EM} (data not shown). Collectively, these results demonstrate that CD4⁺ T_{CM} and T_{EM} subsets exhibit different capacities to proliferate, persist and undergo both spontaneous and Fas-induced apoptosis. These observations led us to investigate the cell survival pathways responsible for that resistance to cell death in T_{CM} and to characterize the differences in these pathways between T_{CM} and T_{EM}.

### Example 4

### Gene Expression Profiling Analysis of T_{CM} and T_{EM} Showed Differences in the Expression of Genes Associated with Survival Pathways

[0136] Using single gene searches, we then identified the genes that distinguished T_{CM} from T_{EM}. Genes selected using ANOVA, where p<0.05 or fold difference in expression >1.3 were considered significant. We identified more than 270 significant genes that distinguished both subsets (see FIGS. 2a and 2b). Within the selected genes, 6% were related to apoptosis, 9% to cell cycle/cell proliferation, and 7% to signaling. These genes also encompassed biological functions including homing/adhesion, gene expression regulation, immune response and transport. Apoptosis-related genes displaying a different expression profile when comparing T_{CM} and T_{EM} are listed in FIG. 3. T_{CM} expressed higher levels of TOSO, CD27, STAT5a, PIM-2, RelA, and Birc6 (Bruce) mRNA, all belonging to distinct anti-apoptotic pathways (Hitoshi, Y., et al., 1998. Immunity 8:461-471; Yan, B. et al., 2003. J Biol Chem 278:45358-45367; Gravestein, L. A. et al., 1998. Eur J Immunol 28:2208-2216; Grossmann, M. et al., 2000. Embo J 19:6351-6360; Hao, Y. et al., 2004. Nat Cell Biol 6:849-860), than their T_{EM} counterparts. In contrast, T_{EM} showed higher levels of expression of genes involved in the induction of apoptosis, including Caspase-8 and Caspase-3, as well as several proteins endowed with a pro-apoptotic function, such as Galactin-1 (LGALS1), Galactin-3 (LGALS3) (Hahn, H. P. et al., 2004. Cell Death Differ 11:1277-1286), Clusterin (Shannan, B. et al., 2006. Cell Death Differ 13:12-19), YARS (Wakasugi, K., and P. Schimmel. 1999. Science 284:147-151) and TGIF, a TGFp-targeted gene (Feng, X. H., and R. Derynck. 2005. Annu Rev Cell Dev Biol. 21:659-93). This expression profile suggested that T_{EM} contain an active pro-apoptotic machinery. On the other hand, several genes that promote cell survival were selectively expressed at high levels in T_{CM}, rendering them more resistant to apoptosis. Of note, we observed similar differences in the expression of several of the above-cited genes when comparing T_{CM} and T_{EM} in the CD8+T cell compartment (data not shown).

[0137] In the next set of experiments, we validated and detailed the gene array data by performing real-time RT-PCR on the same donor samples (FIG. 4). The results showed a significant increase in the FOXO3a transcriptional target pro-apoptotic genes, including Bim (Essafi, A. et al., 2005. Oncogene 24:2317-2329), FasL (Suhara, T. et al., 2002. Mol Cell Biol 22:680-691), and genes involved in cell cycle regulation including GADD45a (Tran, H. et al., 2002. Science 296:530-534) as well as pRb2/p13O, a member of the Retinoblastoma family (Kops, G. J. et al., 2002. Mol Cell Biol 22:2025-2036) in the T_{EM} subset (n=5). Furthermore, the RT-PCR data confirmed the upregulation of CD27 and the anti-apoptotic PIM-2 kinase (FIG. 4), as well as of TOSO and TGIF (data not shown). These results validated our gene array data and further suggested the involvement of STAT5a and FOXO3a signaling pathways in mediating the survival of T_{CM}.

### Example 5

### STAT5A Signaling Pathway is Functionally Upregulated in T_{CM}

[0138] STAT5a is a downstream effector of yc cytokines (Nosaka, T. et al., 1999. Embo J 18:4754-4765). We observed differential expressions of PIM-1 and PIM-2, two transcriptional targets of STAT5a in the ex-vivo T_{CM} subset. Indeed, T_{CM} showed twofold higher expression of both PIM-1 and PIM-2 than T_{EM} (n=3) (FIG. 5A). Because of the importance of the STAT5a pathway in the regulation of T-cell survival (Nosaka, T. et al., supra), we evaluated the ability of IL-2 and IL-7 to trigger the STAT5a signaling pathway in CD4⁺ T cell memory subsets. The phosphorylated form of STAT5a (Y694) (pSTAT5a) was quantified by flow cytometry. Basal pSTAT5a levels were similar in T_{CM} and T_{EM} (FIG. 5B). Both T_{CM} and T_{EM} upregulated pSTAT5a in response to a brief IL-7 treatment (FIG. 5B). However, the proportion of cells that up-regulated pSTAT5a was significantly higher (30%±6.5, p<0.002) in T_{CM} as compared to T_{EM} (FIG. 5C). Treatment with IL-2 also induced differential pSTAT5a levels (p<0.04) between T_{CM} and T_{EM}. Indeed, 90-100% of T_{CM} showed a phosphorylated STAT5a form, compared to 50-60% observed in T_{EM}. Of note, T_{EM} present a bimodal distribution of pSTAT5a in response to IL-2, indicating that T_{EM} are heterogeneous in terms of response to IL-2.

[0139] The differences in pSTAT5a levels were not due to differences in the levels of expression of IL-2 or IL-7 receptors. Indeed, the proportion of cells expressing CD127 (IL-7Rx), CD25 (IL-2Ra) and CD132 (yc chain) on T_{CM} were comparable to those on T_{EM} (FIG. 5D). Of note, CD122 (IL-2RP) was undetectable on ex-vivo T_{CM} and T_{EM} (data not shown). Although IL-2R is expressed on about 20% of T_{CM} as assess by cytometry, 100% of these cells are able to phosphorylate STAT5 in response to IL-2. This suggests that T_{CM} express undetectable levels of IL-2R that are sufficient to induce STAT5 signaling in response to IL-2. Taken together, these results indicate that the STAT5a pathway, as shown by the levels of pSTAT5 and its downstream effectors (PIM-1 and PIM-2), is differentially regulated between T_{CM} and T_{EM}. The observed differences suggest that T_{CM} display an enhanced capacity to mobilize the STAT5a pathway for their survival as compared to T_{EM}.

### Example 6

### Regulation of the FOXO3a Pathway in Memory 4⁺ T Cell Subsets

[0140] FOXO3a (Genbank accession Number NM_{—}001455, Anderson, M. J. et al., 1998. Genomics 47(2), 187-199) belongs to the forkhead family of transcription factors which are characterized by a distinct forkhead domain. FOXO3a transcriptional activity is regulated through direct phosphorylation. Once phosphorylated, FOXO3a is excluded from the nucleus and thus becomes transcriptionally inactive. FOXO3a controls the expression of several genes including FasL, Bim, Gadd45a, p27kip and p130 (Coffer, P. J., and B. M. Burgering. 2004. Nat Rev Immunol 4:889-899, Van Der Heide, L. P. et al., 2004. Biochem J 380:297-309). Our gene expression profiling analysis and RT-PCR data suggested the specific involvement of the FOXO3a pathway in T_{CM} survival. Therefore, we analyzed the phosphorylation status of FOXO3a in T_{CM} and T_{EM}. We observed that the levels of phosphorylated forms of FOXO3a (pFOXO3a) (phosphorylated at position S315 and/or S253 and/or T32) were reproducibly (n=5) more than twofold higher in ex-vivo T_{CM} as compared to T_{EM}. It is worth noting here that expression levels of total FOXO3a remained similar in the two memory subsets (FIG. 6A, upper panel). We then determined whether the observed decrease in FOXO3a phosphorylation levels observed in T_{EM} was associated with increased levels of FOXO3a transcriptional target proteins. Our results show that T_{EM} expressed threefold higher levels of Bim and p130 proteins and a 1.7-fold higher expression of GADD45a when compared to the T_{CM} compartment (FIG. 6A, bottom panel). FasL, whose mRNA transcript was clearly expressed at higher levels in T_{EM} than in T_{CM} (see FIG. 4), was undetectable in ex-vivo T_{CM} and T_{EM} when assayed by Western blot and flow cytometry (data not shown). However, upon T cell activation induced by PMA and ionomycin, FasL was selectively upregulated in T_{EM} (in around 30% of the T_{EM} subset), while it remained undetectable in T_{CM} (FIG. 6B). Taken together, our data show that a high expression of pFOXO3a observed in T_{CM} is associated with the low expression of pro-apoptotic proteins Bim, Gadd45a and p130, thereby favoring their resistance to apoptosis and consequently their long-term survival.

### Example 7

### Blocking of AKT and IKK Kinases Activity Prevents FOXO3A Phosphorylation Leading to T_{CM} Cell Death

[0141] To identify the kinases involved in the phosphorylation of FOXO3a in T_{CM}, we analyzed FOXO3a phosphorylation, in total CD4⁺ T cells (total CD4⁺ T cells were used due to the limiting amounts of T_{CM} and T_{EM} obtained after cell sorting) following treatment with specific kinase inhibitors. We used the pharmacological kinase inhibitors AKT-IV and Wedelolactone, which respectively inhibit AKT and IKK activities. We also tested two other kinase inhibitors: STO-609, specific for CamKK described as an upstream mediator of AKT (Soderling, T. R. 1999. Trends Biochem Sci 24:232-236); and the Mek1/2 inhibitor, U0126, used as an irrelevant kinase inhibitor. The results (FIG. 7A) clearly showed that treatment with the AKT and IKK inhibitors led to a specific and significant reduction in the levels of pFOXO3a (S253). The expression levels of pFOXO3a (S253) in CD4⁺ T cells was eightfold lower in the presence of the AKT-inhibitor and 4.5-fold lower in the presence of the IKK-inhibitor, as compared to untreated cells (FIG. 7A).

[0142] To confirm the importance of the phosphorylation of FOXO3a in memory T-cell survival, purified CD4⁺ T cells were treated with different kinase-inhibitors, and apoptosis was assessed by flow cytometry using Annexin-V labeling. FIG. 7B shows that the proportion of Annexin-V+ cells are increased in a dose-dependant fashion after exposing CD4⁺ T cells to AKT or IKK inhibitors. Moreover, we observed a significant upregulation of the levels of the pro-apoptotic molecule Bim, known to be a FOXO3a target, in cells treated with AKT or IKK inhibitors (three and eightfold respectively) (FIG. 7C). Of note, the AKT and IKK inhibitors did not change the levels of FasL expression when assayed by Western blot or flow cytometry (data not shown). These results indicated that the dephosphorylation of FOXO3a in CD4⁺ T cells was associated with Bim upregulation and apoptosis. None of the other kinase-inhibitors tested induced apoptosis in CD4⁺ T cells (FIG. 7B) even when used at much higher concentrations (data not shown). Taken together, these results show that among the kinase-inhibitors tested, only those able of inducing FOXO3a dephosphorylation have the capacity to induce CD4⁺ T cell apoptosis. It is thus likely that activated AKT and IKK promote CD4⁺ T cell survival, at least in part, by phosphorylating FOXO3a, thereby repressing its transcriptional activity and leading to the downregulation of the transcription of the pro-apoptotic molecule Bim.

[0143] To assess the importance of AKT and IKK in the survival of memory T cells, we evaluated the expression of the phosphorylated forms of these proteins in T_{CM} and T_{EM} subsets. First, pIKKα/β expression was assayed in ex-vivo sorted T_{CM} and T_{EM}. While pIKKα/β was expressed in T_{CM}, it was undetectable in T_{EM} (FIG. 7D). Second, since the phosphorylated form of AKT (pAKT) was undetectable by Western blot in ex-vivo sorted cells, we performed a PhosFlow analysis on PBMCs treated with H₂O₂ (known to induce phosphorylation of AKT). The results showed that the induction of pAKT (S473) was higher in T_{CM} than T_{EM} in response to H₂O₂ (FIG. 7E). More importantly, in response to CD28 triggering, T_{CM} cells presented a modest (about 20%), though consistent and significant increase (p<0.007) in AKT phosphorylation as compared to the T_{EM} (FIG. 7E). These results suggest that in resting T_{CM}, the constitutive activation of IKKα/β could maintain the level of FOXO3a phosphorylation. Moreover, CD28 triggering leads to higher levels of pAKT in T_{CM} and could also promote FOXO3a phosphorylation. Taken together, these results suggest that the phosphorylation levels of FOXO3a in T_{CM} can be maintained, both in their resting state and upon CD28 triggering, through the activation of IKK and AKT, respectively, thereby promoting T_{CM} survival.

[0144] The corollary of the above results is that the lack of FOXO3a phosphorylation could render T_{CM} susceptible to signals inducing cell death. To determine the implication of the AKT- and IKK-signaling pathways in the survival of T_{CM}, we sorted T_{CM} and T_{EM} and exposed them to AKT- or IKK inhibitors at their IC₅₀ (AKT-IV: 1.6 μM and wedelolactone: 100 μM). After 24 h of treatment, the proportion of apoptotic cells was quantified using Annexin-V labeling (FIG. 8, top panel). The treatment of T_{CM} with the IKK inhibitor resulted in an eightfold increase in Annexin-V+ cells, while only a twofold increase was observed in T_{EM}, all relative to untreated cells (n=2) (FIG. 8, bottom panel). Similar results were also observed when these subsets were exposed to the AKT inhibitor (FIG. 8). Experiments aimed at blocking FasL triggering, using Fas-Fc chimera, in response to AKT and IKK inhibitor-induced apoptosis did not prevent T_{CM} cell death (data not shown). These results indicate that abrogating the AKT and/or IKK pathways leads to apoptosis to a greater extent in T_{CM} as compared to T_{EM} confirming that these pathways are involved in the survival of T_{CM}. Moreover, the ability of AKT and IKK inhibitors to up-regulate Bim levels of expression (see FIG. 7C) without affecting FasL expression suggest that cell death induced by these kinase inhibitors could be achieved in part thought FOXO3a dephosphorylation and the subsequent increased expression of pro-apoptotic molecules such as Bim.

### Example 8

### TCR and IL-7 Triggering Phosphorylate Distinct Sites on FOXO3A

[0145] To identify the signals that trigger FOXO3a phosphorylation in CD4⁺ T cells, we quantified the levels of pFOXO3a (S253, S315 and T32) in response to CD3 and/or CD28 cross-linking, as well as IL-2, IL-7, IFN-γ and PMA treatment. pFOXO3a (S253) was easily detectable in ex-vivo CD4⁺ T cells, and none of the tested stimuli induced significant changes in the expression level of this phosphorylated form of FOXO3a (FIG. 9A). In contrast, FOXO3a phosphorylation on S315 was significantly induced in response to CD3+CD28 triggering. It is worth noting that CD3 or CD28 triggering alone did not lead to detectable FOXO3a phosphorylation (S315), suggesting that both signals synergize to induce FOXO3a phosphorylation at S315 (FIG. 9A, top panel, lanes 2, 3 and 4). None of the other tested inducers (including γc cytokines) led to FOXO3a (S315) phosphorylation. Interestingly, the levels of pFOXO3a at T32 were significantly increased (threefold) when CD4⁺ T cells were treated with IL-7. No induction of pFOXO3a (T32) was observed when cells were triggered with anti-CD3/CD28 or IL-2 (FIG. 9B). Taken together, these results indicate that TCR and IL-7 triggering induce specific FOXO3a phosphorylation at distinct sites (S315 and T32 respectively), suggesting that FOXO3a phosphorylation involves multiple signals.

### Example 9

### Comparison of the Expression of Selected Genes in T_{CM} Isolated from Aviremic HAART-Treated Hiv-Infected Individuals vs. Long-Term Non-Progressors (LTNPs)

[0146] PBMC obtained from LTNP and aviremic HAART-treated patients were sorted into T_{CM} and T_{EM} using CD27, CCR7 and CD45RA surface markers. Sorted cells were subjected to RNA isolation, amplification and gene array analysis. Long-term non-progressors (LTNPs) are subjects infected by HIV for more than 10 years and who naturally (i.e. in the absence of antiretroviral therapy) control HIV infection. Their CD4 T cell count remains relatively stable and they exhibit low HIV viral load (Pantaleo G. and Fauci A. S., 1995. Annu Rev Immunol, 13:487-512). Aviremic HAART-treated patients are HIV-infected patients who do not naturally control HIV infection in the absence of antiviral therapy, but who maintained low HIV viral loads when treated with HAART. FIG. 10 shows differences in the gene expression profile of T_{CM} from LTNPs versus aviremic HAART-treated HIV patients. T_{CM} from LTNP subjects show higher expression of IAP3 but lower expression of GADD45a, DUSP1, PTEN, SOCS1 and SOCS2 as compared to T_{CM} from aviremic HAART-treated subjects.

### Example 10

### Comparison of the Expression of Genes in Blood Samples Isolated Prior to and after Yellow Fever-Vaccination

[0147] Whole blood from Yellow Fever (YF)-vaccinated subjects was collected 14 days post-immunization. Whole blood from HIV infected individuals was collected during primary HIV infection (the first 6 months after the first positive diagnosis). Whole blood cells were lysed and their RNA was reverse transcribed to cDNA and subjected to gene array analysis using the method described in Example 1. The Yellow Fever 17D vaccine is a live-attenuated vaccine which induces efficacious and long-term protection against Yellow Fever infection in vaccinated individuals (Barrett A. D., 2001. Ann. N.Y. Acad. Sci., 951: 262-71) and therefore constitutes a good model for the induction of a protective immune response in humans. FIG. 11 depicts the genes whose expression in blood cells is significantly modulated after YF vaccination (3 and/or 7 days after vaccination).

[0148] Although the present invention has been described hereinabove by way of specific embodiments thereof, it can be modified, without departing from the spirit and nature of the subject invention as defined in the appended claims.

The application's sequence listing, which the Patent Office published only in electronic form, follows.

SEQUENCE LISTING (201 sequences)

SEQ ID NO: 1 - DNA, 25 bp, Homo sapiens
aaccgacgattcttctactcaaaac

SEQ ID NO: 2 - DNA, 25 bp, Homo sapiens
gcactgtaactctggtcttctcgtt

SEQ ID NO: 3 - DNA, 25 bp, Homo sapiens
tgcgtgctggtgacgaatccacatt

SEQ ID NO: 4 - DNA, 25 bp, Homo sapiens
ccatttctttcatagatgaagcccg

SEQ ID NO: 5 - DNA, 25 bp, Homo sapiens
tcccccttgtcagactcagtcacat

SEQ ID NO: 6 - DNA, 25 bp, Homo sapiens
attttgacaagtccaaagcacttag

SEQ ID NO: 7 - DNA, 25 bp, Homo sapiens
gaagcaaataggccaccccagtcca

SEQ ID NO: 8 - DNA, 25 bp, Homo sapiens
tcagtgcaatggcttccatgaggca

SEQ ID NO: 9 - DNA, 25 bp, Homo sapiens
ctgcaggagcgctggccgcgcgccg

SEQ ID NO: 10 - DNA, 1840 bp, Homo sapiens
  CDS (104)..(1120)
cccattaggtgacaggtttttagagaagccaatcacgtcgccgcggtcctggttctaaagtcctcgctcacccacccggactcattctccccagacgccaaggatggtggtcatggcgccccgaaccctcttcctgctgctctcgggggccctgaccctgaccgagacctgggcgggctcccactccatgaggtatttcagcgccgccgtgtcccggcccggccgcggggagccccgcttcatcgccatgggctacgtggacgacacgcagttcgtgcggttcgacagcgactcggcgtgtccgaggatggagccgcgggcgccgtgggtggagcaggaggggccggagtattgggaagaggagacacggaacaccaaggcccacgcacagactgacagaatgaacctgcagaccctgcgcggctactacaaccagagcgaggccagttctcacaccctccagtggatgattggctgcgacctggggtccgacggacgcctcctccgcgggtatgaacagtatgcctacgatggcaaggattacctcgccctgaacgaggacctgcgctcctggaccgcagcggacactgcggctcagatctccaagcgcaagtgtgaggcggccaatgtggctgaacaaaggagagcctacctggagggcacgtgcgtggagtggctccacagatacctggagaacgggaaggagatgctgcagcgcgcggacccccccaagacacacgtgacccaccaccctgtctttgactatgaggccaccctgaggtgctgggccctgggcttctaccctgcggagatcatactgacctggcagcgggatggggaggaccagacccaggacgtggagctcgtggagaccaggcctgcaggggatggaaccttccagaagtgggcagctgtggtggtgccttctggagaggagcagagatacacgtgccatgtgcagcatgaggggctgccggagcccctcatgctgagatggaagcagtcttccctgcccaccatccccatcatgggtatcgttgctggcctggttgtccttgcagctgtagtcactggagctgcggtcgctgctgtgctgtggagaaagaagagctcagattgaaaaggagggagctactctcaggctgcaagtaagtatgaaggaggctgatccctgagatccttgggatcttgtgtttgggagccatgggggagctcacccaccccacaattcctcctctggccacatctcctgtggtctctgaccaggtgctgtttttgttctactctaggcagtgacagtgcccagggctctaatgtgtctctcacggcttgtaaatgtgacaccccggggggcctgatgtgtgtgggttgttgaggggaacaggggacatagctgtgctatgaggtttctttgacttcaatgtattgagcatgtgatgggctgtttaaagtgtcacccctcactgtgactgatatgaatttgttcatgaatatttttctgtagtgtgaaacagctgccctgtgtgggactgagtggcaagtccctttgtgacttcaagaaccctgacttctctttgtgcagagaccagcccacccctgtgcccaccatgaccctcttcctcatgctgaactgcattccttccccaatcacctttcctgttccagaaaaggggctgggatgtctccgtctctgtctcaaatttgtggtccactgagctataacttacttctgtattaaaattagaatctgagtataaatttactttttcaaattatttccaagagagattgatgggttaattaaaggagaagattcctgaaatttgagagacaaaataaa

SEQ ID NO: 11 - protein, 338 aa, Homo sapiens
MVVMAPRTLFLLLSGALTLTETWAGSHSMRYFSAAVSRPGRGEPRFIAMGYVDDTQFVRFDSDSACPRMEPRAPWVEQEGPEYWEEETRNTKAHAQTDRMNLQTLRGYYNQSEASSHTLQWMIGCDLGSDGRLLRGYEQYAYDGKDYLALNEDLRSWTAADTAAQISKRKCEAANVAEQRRAYLEGTCVEWLHRYLENGKEMLQRADPPKTHVTHHPVFDYEATLRCWALGFYPAEIILTWQRDGEDQTQDVELVETRPAGDGTFQKWAAVVVPSGEEQRYTCHVQHEGLPEPLMLRWKQSSLPTIPIMGIVAGLVVLAAVVTGAAVAAVLWRKKSSD

SEQ ID NO: 12 - DNA, 1056 bp, Homo sapiens
  CDS (60)..(521)
gtctgcgcggagtctgagcggcgctcgtcccgtcccaaggccgacgccagcacgccgtcatggcccccgcagcggcgacggggggcagcaccctgcccagtggcttctcggtcttcaccaccttgcccgacttgctcttcatctttgagtttatcttcgggggcctggtgtggatcctggtggcctcctccctggtgccctggcccctggtccagggctgggtgatgttcgtgtctgtgttctgcttcgtggccaccaccaccttgatcatcctgtacataattggagcccacggtggagagacttcctgggtcaccttggacgcagcctaccactgcaccgctgccctcttttacctcagcgcctcagtcctggaggccctggccaccatcacgatgcaagacggcttcacctacaggcactaccatgaaaacattgctgccgtggtgttctcctacatagccactctgctctacgtggtccatgcggtgttctctttaatcagatggaagtcttcataaagccgcagtagaacttgagctgaaaacccagatggtgttaactggccgccccactttccggcataactttttagaaaacagaaatgcccttgatggtggaaaaaagaaaacaaccacccccccactgcccaaaaaaaaaagccctgccctgttgctcgtgggtgctgtgtttactctcccgtgtgccttcgcgtccgggttgggagcttgctgtgtctaacctccaactgctgtgctgtctgctagggtcacctcctgtttgtgaaaggggaccttcttgttcgggggtgggaagtggcgaccgtgacctgagaaggaaagaaagatcctctgctgacccctggagcagctctcgagaactacctgttggtattgtccacaagctctcccgagcgccccatcttgtgccatgttttaagtcttcatggatgttctgcatgtcatggggactaaaactcacccaacagatctttccagaggtccatggtggaagacgataaccctgtgaaatactttataaaatgtcttaatgttc

SEQ ID NO: 13 - protein, 153 aa, Homo sapiens
MAPAAATGGSTLPSGFSVFTTLPDLLFIFEFIFGGLVWILVASSLVPWPLVQGWVMFVSVFCFVATTTLIILYIIGAHGGETSWVTLDAAYHCTAALFYLSASVLEALATITMQDGFTYRHYHENIAAVVFSYIATLLYVVHAVFSLIRWKSS

SEQ ID NO: 14 - DNA, 930 bp, Homo sapiens
  CDS (60)..(395)
gtctgcgcggagtctgagcggcgctcgtcccgtcccaaggccgacgccagcacgccgtcatggcccccgcagcggcgacggggggcagcaccctgcccagtggcttctcggtcttcaccaccttgcccgacttgctcttcatctttgagtttatcttcgggggcctggtgtggatcctggtggcctcctccctggtgccctggcccctggtccagggctgggtgatgttcgtgtctgtgttctgcttcgtggccaccaccaccttgatcatcctgtacataattggagcccacggtggagagacttcctgggtcaccttggtgttctcctacatagccactctgctctacgtggtccatgcggtgttctctttaatcagatggaagtcttcataaagccgcagtagaacttgagctgaaaacccagatggtgttaactggccgccccactttccggcataactttttagaaaacagaaatgcccttgatggtggaaaaaagaaaacaaccacccccccactgcccaaaaaaaaaagccctgccctgttgctcgtgggtgctgtgtttactctcccgtgtgccttcgcgtccgggttgggagcttgctgtgtctaacctccaactgctgtgctgtctgctagggtcacctcctgtttgtgaaaggggaccttcttgttcgggggtgggaagtggccaccgtgacctgagaaggaaagaaagatcctctgctgacccctggagcagctctcgagaactacctgttggtattgtccacaagctctcccgagcgccccatcttgtgccatgttttaagtcttcatggatgttctgcatgtcatgcggactaaaactcacccaacagatctttccagaggtccatggtggaagacgataaccctgtgaaatactttataaaatgtcttaatgttc

SEQ ID NO: 15 - protein, 111 aa, Homo sapiens
MAPAAATGGSTLPSGFSVFTTLPDLLFIFEFIFGGLVWILVASSLVPWPLVQGWVMFVSVFCFVATTTLIILYIIGAHGGETSWVTLVFSYIATLLYVVHAVFSLIRWKSS

SEQ ID NO: 16 - DNA, 888 bp, Homo sapiens
  CDS (60)..(353)
gtctgcgcggagtctgagcggcgctcgtcccgtcccaaggccgacgccagcacgccgtcatggcccccgcagcggcgacggggggcagcaccctgcccagtggcttctcggtcttcaccaccttgcccgacttgctcttcatctttgagtttgacgcagcctaccactgcaccgctgccctcttttacctcagcgcctcagtcctggaggccctggccaccatcacgatgcaagacggcttcacctacaggcactaccatgaaaacattgctgccgtggtgttctcctacatagccactctgctctacgtggtccatgcggtgttctctttaatcagatggaagtcttcataaagccgcagtagaacttgagctgaaaacccagatggtgttaactggccgccccactttccggcataactttttagaaaacagaaatgcccttgatggtggaaaaaagaaaacaaccacccccccactgcccaaaaaaaaaagccctgccctgttgctcgtgggtgctgtgtttactctcccgtgtgccttcgcgtccgggttgggagcttgctgtgtctaacctccaactgctgtgctgtctgctagggtcacctcctgtttgtgaaaggggaccttcttgttcgggggtgggaagtggccaccgtgacctgagaaggaaagaaagatcctctgctgacccctggagcagctctcgagaactacctgttggtattgtccacaagctctcccgagcgccccatcttgtgccatgttttaagtcttcatggatgttctgcatgtcatgcggactaaaactcacccaacagatctttccagaggtccatggtggaagacgataaccctgtgaaatactttataaaatgtcttaatgttc

SEQ ID NO: 17 - protein, 97 aa, Homo sapiens
MAPAAATGGSTLPSGFSVFTTLPDLLFIFEFDAAYHCTAALFYLSASVLEALATITMQDGFTYRHYHENIAAVVFSYIATLLYVVHAVFSLIRWKSS

SEQ ID NO: 18 - DNA, 762 bp, Homo sapiens
  CDS (60)..(227)
gtctgcgcggagtctgagcggcgctcgtcccgtcccaaggccgacgccagcacgccgtcatggcccccgcagcggcgacggggggcagcaccctgcccagtggcttctcggtcttcaccaccttgcccgacttgctcttcatctttgagtttgtgttctcctacatagccactctgctctacgtggtccatgcggtgttctctttaatcagatggaagtcttcataaagccgcagtagaacttgagctgaaaacccagatggtgttaactggccgccccactttccggcataactttttagaaaacagaaatgcccttgatggtggaaaaaagaaaacaaccacccccccactgcccaaaaaaaaaagccctgccctgttgctcgtgggtgctgtgtttactctcccgtgtgccttcgcgtccgggttgggagcttgctgtgtctaacctccaactgctgtgctgtctgctagggtcacctcctgtttgtgaaaggggaccttcttgttcgggggtgggaagtggccaccgtgacctgagaaggaaagaaagatcctctgctgacccctggagcagctctcgagaactacctgttggtattgtccacaagctctcccgagcgccccatcttgtgccatgttttaagtcttcatggatgttctgcatgtcatgcggactaaaactcacccaacagatctttccagaggtccatggtggaagacgataaccctgtgaaatactttataaaatgtcttaatgttc

SEQ ID NO: 19 - protein, 55 aa, Homo sapiens
MAPAAATGGSTLPSGFSVFTTLPDLLFIFEFVFSYIATLLYVVHAVFSLIRWKSS

SEQ ID NO: 20 - DNA, 933 bp, Homo sapiens
  CDS (366)..(671)
ggctgtgcgctctggggcacctcatgcagacgggagtagggaggctgttttttgcgcgtgcatatggcggtggcgggtggggggaagggggagatcctgctgcactggccgcccaagttggggggcgagctcggtggtgacgcgcggccctcacgtgacccagagctgcagagcgacgcagccttcggtgcagtcgtcactcgcgtctggctaccagctccccgctgccctgagctcggcgggctggcattcggcccggggaaaagcggagcaggtctgcgaggctaagtgtctccgcggcgcacctcgcggcgagaatccggaggagaaggagactgcaaggataggcccaggaaaacgaagagatggagcagcctatgcagaatggagaggaagaccgccctttgggaggaggtgaaggccaccagcctgcaggaaatcgacggggacaggctcgccgacttgcccctaattttcgatgggccatacccaataggcagatcaatgatgggatgggtggagatggagatgatatggaaatattcatggaggagatgagagaaatcagaagaaaacttagggagctgcagttgaggaattgtctgcgtatccttatgggggagctctctaatcaccatgaccatcatgatgaattttgccttatgccttgactcctgccatttatcatgagattaatactgtgattcccgctgttttctttttccttgcattttcctaatatgcctttactgatccgtttgctgtgaaccctatgttatttccatgtgtcaagtgggtcttgtgttgccagcttctatttgaagattgcctttgcactcagtgtaagtttctgtcagcagtagtttcacccatttgcatggaaaaatttaaagctaataaagcaatttaaaaagcaaaaaaaaaaaaaaaaaa

SEQ ID NO: 21 - protein, 101 aa, Homo sapiens
MEQPMQNGEEDRPLGGGEGHQPAGNRRGQARRLAPNFRWAIPNRQINDGMGGDGDDMEIFMEEMREIRRKLRELQLRNCLRILMGELSNHHDHHDEFCLMP

SEQ ID NO: 22 - DNA, 980 bp, Homo sapiens
  CDS (383)..(718)
ggctgtgcgctctggggcacctcatgcagacgggagtagggaggctgttttttgcgcgtgcatatggcggtggcgggtggggggaagggggagatcctgctgcactggccgcccaagttggggggcgagctcggtggtgacgcgcggccctcacgtgacccagagctgcagagcgacgcagccttcggtgcagtcgtcactcgcgtctggctaccagctccccgctgccctgagctcggcgggctggcattcggcccggggaaaagcggagcaggtctgcgaggctaagtgtctccgcggcgcacctcgcggcgagaatccggaggagaaggagactgcaaggataggcccagaaaaacaaccagaaaaaaaaaatctcatcatggcaaatattcaccaggaaaacgaagagatggagcagcctatgcagaatggagaggaagaccgccctttgggaggaggtgaaggccaccagcctgcaggaaatcgacggggacaggctcgccgacttgcccctaattttcgatgggccatacccaataggcagatcaatgatgggatgggtggagatggagatgatatggaaatattcatggaggagatgagagaaatcagaagaaaacttagggagctgcagttgaggaattgtctgcgtatccttatgggggagctctctaatcaccatgaccatcatgatgaattttgccttatgccttgactcctgccatttatcatgagattaatactgtgattcccgctgttttctttttccttgcattttcctaatatgcctttactgatccgtttgctgtgaaccctatgttatttccatgtgtcaagtgggtcttgtgttgccagcttctatttgaagattgcctttgcactcagtgtaagtttctgtcagcagtagtttcacccatttgcatggaaaaatttaaagctaataaagcaatttaaaaagcaaaaaaaaaaaaaaaaaa

SEQ ID NO: 23 - protein, 111 aa, Homo sapiens
MANIHQENEEMEQPMQNGEEDRPLGGGEGHQPAGNRRGQARRLAPNFRWAIPNRQINDGMGGDGDDMEIFMEEMREIRRKLRELQLRNCLRILMGELSNHHDHHDEFCLMP

SEQ ID NO: 24 - DNA, 891 bp, Homo sapiens
  CDS (312)..(647)
accccatcccccactcctataccggtcctccattttggtgcctgcaaagctctgggaaagaatcccgggaaacgaaaaatggtgggtttgggggaagggaggtaaggggagaaagctggagggaggggctttaattggaggccccgtagaggacgcgcggaacttctaaggtgggaaaaaacgaaattaaaaaatcctttgatatcagggctctgaatcctgctggtcagagcaccaagcattcagtctctctccttgcctttgtcttacttgtgttcaaagaaaaacaaccagaaaaaaaaaatctcatcatggcaaatattcaccaggaaaacgaagagatggagcagcctatgcagaatggagaggaagaccgccctttgggaggaggtgaaggccaccagcctgcaggaaatcgacggggacaggctcgccgacttgcccctaattttcgatgggccatacccaataggcagatcaatgatgggatgggtggagatggagatgatatggaaatattcatggaggagatgagagaaatcagaagaaaacttagggagctgcagttgaggaattgtctgcgtatccttatgggggagctctctaatcaccatgaccatcatgatgaattttgccttatgccttgactcctgccatttatcatgagattaatactgtgattcccgctgttttctttttccttgcattttcctaatatgcctttactgatccgtttgctgtgaaccctatgttatttccatgtgtcaagtgggtcttgtgttgccagcttctatttgaagattgcctttgcactcagtgtaagtttctgtcagcagtagtttcacccatttgcatggaaaaatttaaagctaataaagcaatttaaaaagc

SEQ ID NO: 25 - protein, 111 aa, Homo sapiens; identical to SEQ ID NO: 23

SEQ ID NO: 26 - DNA, 1316 bp, Homo sapiens
  CDS (29)..(1114)
gtgggcagccgaggccgcgaactgcatcatggagaattttgtagccaccttggctaatgggatgagcctccagccgcctcttgaagaagtgtcctgtggccaggcggaaagcagtgagaagcccaacgctgaggacatgacatccaaagattactactttgactcctacgcacactttggcatccacgaggagatgctgaaggacgaggtgcgcaccctcacttaccgcaactccatgtttcataaccggcacctcttcaaggacaaggtggtgctggacgtcggctcgggcaccggcatcctctgcatgtttgctgccaaggccggggcccgcaaggtcatcgggatcgtgtgttccagtatctctgattatgcggtgaagatcgtcaaagccaacaagttagaccacgtggtgaccatcatcaaggggaaggtggaggaggtggagctcccagtggagaaggtggacatcatcatcagcgagtggatgggctactgcctcttctacgagtccatgctcaacaccgtgctctatgcccgggacaagtggctggcgcccgatggcctcatcttcccagaccgggccacgctgtatgtgacggccatcgaggaccggcagtacaaagactacaagatccactggtgggagaacgtgtatggcttcgacatgtcttgcatcaaagatgtggccattaaggagcccctagtggatgtcgtggaccccaaacagctggtcaccaacgcctgcctcataaaggaggtggacatctataccgtcaaggtggaagacctgaccttcacctccccgttctgcctgcaagtgaagcggaatgactacgtgcacgccctggtggcctacttcaacatcgagttcacacgctgccacaagaggaccggcttctccaccagccccgagtccccgtacacgcactggaagcagacggtgttctacatggaggactacctgaccgtgaagacgggcgaggagatcttcggcaccatcggcatgcggcccaacgccaagaacaaccgggacctggacttcaccatcgacctggacttcaagggccagctgtgcgagctgtcctgctccaccgactaccggatgcgctgaggcccggctctcccgccctgcacgagcccaggggctgagcgttcctaggcggtttcggggctcccccttcctctccctccctcccgcagaagggggttttaggggcctgggctggggggatggggagggcacatcgtgactgtgtttttcataacttatgtttttatatggttgcatttacgccaataaatcctcagctggg

SEQ ID NO: 27 - protein, 361 aa, Homo sapiens
MENFVATLANGMSLQPPLEEVSCGQAESSEKPNAEDMTSKDYYFDSYAHFGIHEEMLKDEVRTLTYRNSMFHNRHLFKDKVVLDVGSGTGILCMFAAKAGARKVIGIVCSSISDYAVKIVKANKLDHVVTIIKGKVEEVELPVEKVDIIISEWMGYCLFYESMLNTVLYARDKWLAPDGLIFPDRATLYVTAIEDRQYKDYKIHWWENVYGFDMSCIKDVAIKEPLVDVVDPKQLVTNACLIKEVDIYTVKVEDLTFTSPFCLQVKRNDYVHALVAYFNIEFTRCHKRTGFSTSPESPYTHWKQTVFYMEDYLTVKTGEEIFGTIGMRPNAKNNRDLDFTIDLDFKGQLCELSCSTDYRMR

SEQ ID NO: 28 - DNA, 1435 bp, Homo sapiens
  CDS (190)..(1233)
gtgggcagccgaggccgcgaactgcatcatggagaattttgtagccaccttggctaatgggatgagcctccagccgcctcttgaagaagtaacccccctttgcccttccctgtgtctgcccccattttccttcccctcccctccccagctgtgggctgagctagagacggggtcagagagactggagagatggtaggcgtggctgaggtgtcctgtggccaggcggaaagcagtgagaagcccaacgctgaggacatgacatccaaagattactactttgactcctacgcacactttggcatccacgaggagatgctgaaggacgaggtgcgcaccctcacttaccgcaactccatgtttcataaccggcacctcttcaaggacaaggtggtgctggacgtcggctcgggcaccggcatcctctgcatgtttgctgccaaggccggggcccgcaaggtcatcgggatcgtgtgttccagtatctctgattatgcggtgaagatcgtcaaagccaacaagttagaccacgtggtgaccatcatcaaggggaaggtggaggaggtggagctcccagtggagaaggtggacatcatcatcagcgagtggatgggctactgcctcttctacgagtccatgctcaacaccgtgctctatgcccgggacaagtggctggcgcccgatggcctcatcttcccagaccgggccacgctgtatgtgacggccatcgaggaccggcagtacaaagactacaagatccactggtgggagaacgtgtatggcttcgacatgtcttgcatcaaagatgtggccattaaggagcccctagtggatgtcgtggaccccaaacagctggtcaccaacgcctgcctcataaaggaggtggacatctataccgtcaaggtggaagacctgaccttcacctccccgttctgcctgcaagtgaagcggaatgactacgtgcacgccctggtggcctacttcaacatcgagttcacacgctgccacaagaggaccggcttctccaccagccccgagtccccgtacacgcactggaagcagacggtgttctacatggaggactacctgaccgtgaagacgggcgaggagatcttcggcaccatcggcatgcggcccaacgccaagaacaaccgggacctggacttcaccatcgacctggacttcaagggccagctgtgcgagctgtcctgctccaccgactaccggatgcgctgaggcccggctctcccgccctgcacgagcccaggggctgagcgttcctaggcggtttcggggctcccccttcctctccctccctcccgcagaagggggttttaggggcctgggctggggggatggggagggcacatcgtgactgtgtttttcataacttatgtttttatatggttgcatttacgccaataaatcctcagctggg

SEQ ID NO: 29 - protein, 347 aa, Homo sapiens
MVGVAEVSCGQAESSEKPNAEDMTSKDYYFDSYAHFGIHEEMLKDEVRTLTYRNSMFHNRHLFKDKVVLDVGSGTGILCMFAAKAGARKVIGIVCSSISDYAVKIVKANKLDHVVTIIKGKVEEVELPVEKVDIIISEWMGYCLFYESMLNTVLYARDKWLAPDGLIFPDRATLYVTAIEDRQYKDYKIHWWENVYGFDMSCIKDVAIKEPLVDVVDPKQLVTNACLIKEVDIYTVKVEDLTFTSPFCLQVKRNDYVHALVAYFNIEFTRCHKRTGFSTSPESPYTHWKQTVFYMEDYLTVKTGEEIFGTIGMRPNAKNNRDLDFTIDLDFKGQLCELSCSTDYRMR

SEQ ID NO: 30 - DNA, 1262 bp, Homo sapiens
  CDS (29)..(1060)
gtgggcagccgaggccgcgaactgcatcatggaggtgtcctgtggccaggcggaaagcagtgagaagcccaacgctgaggacatgacatccaaagattactactttgactcctacgcacactttggcatccacgaggagatgctgaaggacgaggtgcgcaccctcacttaccgcaactccatgtttcataaccggcacctcttcaaggacaaggtggtgctggacgtcggctcgggcaccggcatcctctgcatgtttgctgccaaggccggggcccgcaaggtcatcgggatcgtgtgttccagtatctctgattatgcggtgaagatcgtcaaagccaacaagttagaccacgtggtgaccatcatcaaggggaaggtggaggaggtggagctcccagtggagaaggtggacatcatcatcagcgagtggatgggctactgcctcttctacgagtccatgctcaacaccgtgctctatgcccgggacaagtggctggcgcccgatggcctcatcttcccagaccgggccacgctgtatgtgacggccatcgaggaccggcagtacaaagactacaagatccactggtgggagaacgtgtatggcttcgacatgtcttgcatcaaagatgtggccattaaggagcccctagtggatgtcgtggaccccaaacagctggtcaccaacgcctgcctcataaaggaggtggacatctataccgtcaaggtggaagacctgaccttcacctccccgttctgcctgcaagtgaagcggaatgactacgtgcacgccctggtggcctacttcaacatcgagttcacacgctgccacaagaggaccggcttctccaccagccccgagtccccgtacacgcactggaagcagacggtgttctacatggaggactacctgaccgtgaagacgggcgaggagatcttcggcaccatcggcatgcggcccaacgccaagaacaaccgggacctggacttcaccatcgacctggacttcaagggccagctgtgcgagctgtcctgctccaccgactaccggatgcgctgaggcccggctctcccgccctgcacgagcccaggggctgagcgttcctaggcggtttcggggctcccccttcctctccctccctcccgcagaagggggttttaggggcctgggctggggggatggggagggcacatcgtgactgtgtttttcataacttatgtttttatatggttgcatttacgccaataaatcctcagctggg

SEQ ID NO: 31 - protein, 343 aa, Homo sapiens
MEVSCGQAESSEKPNAEDMTSKDYYFDSYAHFGIHEEMLKDEVRTLTYRNSMFHNRHLFKDKVVLDVGSGTGILCMFAAKAGARKVIGIVCSSISDYAVKIVKANKLDHVVTIIKGKVEEVELPVEKVDIIISEWMGYCLFYESMLNTVLYARDKWLAPDGLIFPDRATLYVTAIEDRQYKDYKIHWWENVYGFDMSCIKDVAIKEPLVDVVDPKQLVTNACLIKEVDIYTVKVEDLTFTSPFCLQVKRNDYVHALVAYFNIEFTRCHKRTGFSTSPESPYTHWKQTVFYMEDYLTVKTGEEIFGTIGMRPNAKNNRDLDFTIDLDFKGQLCELSCSTDYRMR

SEQ ID NO: 32 - DNA, 2698 bp, Homo sapiens
  CDS (59)..(1144)
ggggcggagctggagggggtggttcggcgtgggggccgttggctccagacaaataaacatggagtccatcttccacgagaaacaagaaggctcactttgtgctcaacattgcctgaataacttattgcaaggagaatattttagccctgtggaattatcctcaattgcacatcagctggatgaggaggagaggatgagaatggcagaaggaggagttactagtgaagattatcgcacgtttttacagcagccttctggaaatatggatgacagtggttttttctctattcaggttataagcaatgccttgaaagtttggggtttagaactaatcctgttcaacagtccagagtatcagaggctcaggatcgatcctataaatgaaagatcatttatatgcaattataaggaacactggtttacagttagaaaattaggaaaacagtggtttaacttgaattctctcttgacgggtccagaattaatatcagatacatatcttgcacttttcttggctcaattacaacaggaaggttattctatatttgtcgttaagggtgatctgccagattgcgaagctgaccaactcctgcagatgattagggtccaacagatgcatcgaccaaaacttattggagaagaattagcacaactaaaagagcaaagagtccataaaacagacctggaacgagtgttagaagcaaatgatggctcaggaatgttagacgaagatgaggaggatttgcagagggctctggcactaagtcgccaagaaattgacatggaagatgaggaagcagatctccgcagggctattcagctaagtatgcaaggtagttccagaaacatatctcaagatatgacacagacatcaggtacaaatcttacttcagaagagcttcggaagagacgagaagcctactttgaaaaacagcagcaaaagcagcaacagcagcagcagcagcagcagcagggggacctatcaggacagagttcacatccatgtgaaaggccagccaccagttcaggagcacttgggagtgatctaggtgatgctatgagtgaagaagacatgcttcaggcagctgtgaccatgtctttagaaactgtcagaaatgatttgaaaacagaaggaaaaaaataatacctttaaaaaataatttagatattcatactttccaacattatcctgtgtgattacagcatagggtccactttggtaatgtgtcaaagagatgaggaaataagacttttagcggtttgcaaacaaaatgatgggaaagtggaacaatgcgtcggttgtaggactaaataatgatcttccaaatattagccaaagaggcattcagcaattaaagacatttaaaatagttttctaaatgtttctttttcttttttgagtgtgcaatatgtaacatgtctaaagttagggcatttttcttggatctttttgcagactagctaattagctctcgcctcaggctttttccatatagtttgttttctttttctgtcttgtaggtaagttggctcacatcatgtaatagtggctttcatttcttattaaccaaattaacctttcaggaaagtatctctactttcctgatgttgataatagtaatggttctagaaggatgaacagttctcccttcaactgtataccgtgtgctccagtgttttcttgtgttgttttctctgatcacaacttttctgctacctggttttcattattttcccacaattcttttgaaagatggtaatcttttctgaggtttagcgttttaagccctacgatgggatcattatttcatgactggtgcgttcctaaactctgaaatcagccttgcacaagtacttgagaataaatgagcattttttaaaatgtgtgagcatgtgctttcccagatgctttatgaatgtcttttcacttatatcaaaaccttacagctttgttgcaaccccttcttcctgcgccttattttttcctttcttctccaattgagaaaactaggagaagcatagtatgcaggcaagtctccttctgttagaagactaaacatacgtacccaccatgaatgtatgatacatgaaatttggccttcaattttaatagcagttttattttattttttctcctatgactggagctttgtgttctctttacagttgagtcatggaatgtaggtgtctgcttcacatcttttagtaggtatagcttgtcaaagatggtgatctggaacatgaaaataatttactaatgaaaatatgtttaaatttatactgtgatttgacacttgcatcatgtttagatagcttaagaacaatggaagtcacagtacttagtggatctataaataagaaagtccatagttttgataaatattctctttaattgagatgtacagagagtttcttgctgggtcaataggatagtatcattttggtgaaaaccatgtctctgaaattgatgttttagtttcagtgttccctatccctcattctccatctccttttgaagctcttttgaatgttgaattgttcataagctaaaatccaagaaatttcagctgacaacttcgaaaattataatatggtatattgccctcctggtgtgtggctgcacacattttatcagggaaagttttttgatctaggatttattgctaactaactgaaaaaaaaaaaaaaaaaaaaaaaa

SEQ ID NO: 33 - protein, 361 aa, Homo sapiens
MESIFHEKQEGSLCAQHCLNNLLQGEYFSPVELSSIAHQLDEEERMRMAEGGVTSEDYRTFLQQPSGNMDDSGFFSIQVISNALKVWGLELILFNSPEYQRLRIDPINERSFICNYKEHWFTVRKLGKQWFNLNSLLTGPELISDTYLALFLAQLQQEGYSIFVVKGDLPDCEADQLLQMIRVQQMHRPKLIGEELAQLKEQRVHKTDLERVLEANDGSGMLDEDEEDLQRALALSRQEIDMEDEEADLRRAIQLSMQGSSRNISQDMTQTSGTNLTSEELRKRREAYFEKQQQKQQQQQQQQQQGDLSGQSSHPCERPATSSGALGSDLGDAMSEEDMLQAAVTMSLETVRNDLKTEGKK

SEQ ID NO: 34 - DNA, 2533 bp, Homo sapiens
  CDS (59)..(979)
ggggcggagctggagggggtggttcggcgtgggggccgttggctccagacaaataaacatggagtccatcttccacgagaaacagccttctggaaatatggatgacagtggttttttctctattcaggttataagcaatgccttgaaagtttggggtttagaactaatcctgttcaacagtccagagtatcagaggctcaggatcgatcctataaatgaaagatcatttatatgcaattataaggaacactggtttacagttagaaaattaggaaaacagtggtttaacttgaattctctcttgacgggtccagaattaatatcagatacatatcttgcacttttcttggctcaattacaacaggaaggttattctatatttgtcgttaagggtgatctgccagattgcgaagctgaccaactcctgcagatgattagggtccaacagatgcatcgaccaaaacttattggagaagaattagcacaactaaaagagcaaagagtccataaaacagacctggaacgagtgttagaagcaaatgatggctcaggaatgttagacgaagatgaggaggatttgcagagggctctggcactaagtcgccaagaaattgacatggaagatgaggaagcagatctccgcagggctattcagctaagtatgcaaggtagttccagaaacatatctcaagatatgacacagacatcaggtacaaatcttacttcagaagagcttcggaagagacgagaagcctactttgaaaaacagcagcaaaagcagcaacagcagcagcagcagcagcagcagggggacctatcaggacagagttcacatccatgtgaaaggccagccaccagttcaggagcacttgggagtgatctaggtgatgctatgagtgaagaagacatgcttcaggcagctgtgaccatgtctttagaaactgtcagaaatgatttgaaaacagaaggaaaaaaataatacctttaaaaaataatttagatattcatactttccaacattatcctgtgtgattacagcatagggtccactttggtaatgtgtcaaagagatgaggaaataagacttttagcggtttgcaaacaaaatgatgggaaagtggaacaatgcgtcggttgtaggactaaataatgatcttccaaatattagccaaagaggcattcagcaattaaagacatttaaaatagttttctaaatgtttctttttcttttttgagtgtgcaatatgtaacatgtctaaagttagggcatttttcttggatctttttgcagactagctaattagctctcgcctcaggctttttccatatagtttgttttctttttctgtcttgtaggtaagttggctcacatcatgtaatagtggctttcatttcttattaaccaaattaacctttcaggaaagtatctctactttcctgatgttgataatagtaatggttctagaaggatgaacagttctcccttcaactgtataccgtgtgctccagtgttttcttgtgttgttttctctgatcacaacttttctgctacctggttttcattattttcccacaattcttttgaaagatggtaatcttttctgaggtttagcgttttaagccctacgatgggatcattatttcatgactggtgcgttcctaaactctgaaatcagccttgcacaagtacttgagaataaatgagcattttttaaaatgtgtgagcatgtgctttcccagatgctttatgaatgtcttttcacttatatcaaaaccttacagctttgttgcaaccccttcttcctgcgccttattttttcctttcttctccaattgagaaaactaggagaagcatagtatgcaggcaagtctccttctgttagaagactaaacatacgtacccaccatgaatgtatgatacatgaaatttggccttcaattttaatagcagttttattttattttttctcctatgactggagctttgtgttctctttacagttgagtcatggaatgtaggtgtctgcttcacatcttttagtaggtatagcttgtcaaagatggtgatctggaacatgaaaataatttactaatgaaaatatgtttaaatttatactgtgatttgacacttgcatcatgtttagatagcttaagaacaatggaagtcacagtacttagtggatctataaataagaaagtccatagttttgataaatattctctttaattgagatgtacagagagtttcttgctgggtcaataggatagtatcattttggtgaaaaccatgtctctgaaattgatgttttagtttcagtgttccctatccctcattctccatctccttttgaagctcttttgaatgttgaattgttcataagctaaaatccaagaaatttcagctgacaacttcgaaaattataatatggtatattgccctcctggtgtgtggctgcacacattttatcagggaaagttttttgatctaggatttattgctaactaactgaaaaaaaaaaaaaaaaaaaaaaaa

SEQ ID NO: 35 - protein, 306 aa, Homo sapiens
MESIFHEKQPSGNMDDSGFFSIQVISNALKVWGLELILFNSPEYQRLRIDPINERSFICNYKEHWFTVRKLGKQWFNLNSLLTGPELISDTYLALFLAQLQQEGYSIFVVKGDLPDCEADQLLQMIRVQQMHRPKLIGEELAQLKEQRVHKTDLERVLEANDGSGMLDEDEEDLQRALALSRQEIDMEDEEADLRRAIQLSMQGSSRNISQDMTQTSGTNLTSEELRKRREAYFEKQQQKQQQQQQQQQQGDLSGQSSHPCERPATSSGALGSDLGDAMSEEDMLQAAVTMSLETVRNDLKTEGKK

SEQ ID NO: 36 - DNA, 2612 bp, Homo sapiens
  CDS (59)..(298)
ggggcggagctggagggggtggttcggcgtgggggccgttggctccagacaaataaacatggagtccatcttccacgagaaacaagaaggctcactttgtgctcaacattgcctgaataacttattgcaaggagaatattttagccctgtggaattatcctcaattgcacatcagctggatgaggaggagaggatgagaatggcagaaggaggagttactagtgaagattatcgcacgtttttacagcagccttctggaaatatggatgacagtggttttttctctattcagaaatgaaagatcatttatatgcaattataaggaacactggtttacagttagaaaattaggaaaacagtggtttaacttgaattctctcttgacgggtccagaattaatatcagatacatatcttgcacttttcttggctcaattacaacaggaaggttattctatatttgtcgttaagggtgatctgccagattgcgaagctgaccaactcctgcagatgattagggtccaacagatgcatcgaccaaaacttattggagaagaattagcacaactaaaagagcaaagagtccataaaacagacctggaacgagtgttagaagcaaatgatggctcaggaatgttagacgaagatgaggaggatttgcagagggctctggcactaagtcgccaagaaattgacatggaagatgaggaagcagatctccgcagggctattcagctaagtatgcaaggtagttccagaaacatatctcaagatatgacacagacatcaggtacaaatcttacttcagaagagcttcggaagagacgagaagcctactttgaaaaacagcagcaaaagcagcaacagcagcagcagcagcagcagcagggggacctatcaggacagagttcacatccatgtgaaaggccagccaccagttcaggagcacttgggagtgatctaggtgatgctatgagtgaagaagacatgcttcaggcagctgtgaccatgtctttagaaactgtcagaaatgatttgaaaacagaaggaaaaaaataatacctttaaaaaataatttagatattcatactttccaacattatcctgtgtgattacagcatagggtccactttggtaatgtgtcaaagagatgaggaaataagacttttagcggtttgcaaacaaaatgatgggaaagtggaacaatgcgtcggttgtaggactaaataatgatcttccaaatattagccaaagaggcattcagcaattaaagacatttaaaatagttttctaaatgtttctttttcttttttgagtgtgcaatatgtaacatgtctaaagttagggcatttttcttggatctttttgcagactagctaattagctctcgcctcaggctttttccatatagtttgttttctttttctgtcttgtaggtaagttggctcacatcatgtaatagtggctttcatttcttattaaccaaattaacctttcaggaaagtatctctactttcctgatgttgataatagtaatggttctagaaggatgaacagttctcccttcaactgtataccgtgtgctccagtgttttcttgtgttgttttctctgatcacaacttttctgctacctggttttcattattttcccacaattcttttgaaagatggtaatcttttctgaggtttagcgttttaagccctacgatgggatcattatttcatgactggtgcgttcctaaactctgaaatcagccttgcacaagtacttgagaataaatgagcattttttaaaatgtgtgagcatgtgctttcccagatgctttatgaatgtcttttcacttatatcaaaaccttacagctttgttgcaaccccttcttcctgcgccttattttttcctttcttctccaattgagaaaactaggagaagcatagtatgcaggcaagtctccttctgttagaagactaaacatacgtacccaccatgaatgtatgatacatgaaatttggccttcaattttaatagcagttttattttattttttctcctatgactggagctttgtgttctctttacagttgagtcatggaatgtaggtgtctgcttcacatcttttagtaggtatagcttgtcaaagatggtgatctggaacatgaaaataatttactaatgaaaatatgtttaaatttatactgtgatttgacacttgcatcatgtttagatagcttaagaacaatggaagtcacagtacttagtggatctataaataagaaagtccatagttttgataaatattctctttaattgagatgtacagagagtttcttgctgggtcaataggatagtatcattttggtgaaaaccatgtctctgaaattgatgttttagtttcagtgttccctatccctcattctccatctccttttgaagctcttttgaatgttgaattgttcataagctaaaatccaagaaatttcagctgacaacttcgaaaattataatatggtatattgccctcctggtgtgtggctgcacacattttatcagggaaagttttttgatctaggatttattgctaactaactgaaaaaaaaaaaaaaaaaaaaaaaa

SEQ ID NO: 37 - protein, 79 aa, Homo sapiens
MESIFHEKQEGSLCAQHCLNNLLQGEYFSPVELSSIAHQLDEEERMRMAEGGVTSEDYRTFLQQPSGNMDDSGFFSIQK

SEQ ID NO: 38 - DNA, 1320 bp, Homo sapiens
  CDS (212)..(994)
cggaaggggaagggggtggaggttgctgctatgagagagaaaaaaaaaacagccacaatagagattctgccttcaaaggttggcttgccacctgaagcagccactgcccagggggtgcaaagaagagacagcagcgcccagcttggaggtgctaactccagaggccagcatcagcaactgggcacagaaaggagccgcctgggcagggaccatggcacggccacatccctggtggctgtgcgttctggggaccctggtggggctctcagctactccagcccccaagagctgcccagagaggcactactgggctcagggaaagctgtgctgccagatgtgtgagccaggaacattcctcgtgaaggactgtgaccagcatagaaaggctgctcagtgtgatccttgcataccgggggtctccttctctcctgaccaccacacccggccccactgtgagagctgtcggcactgtaactctggtcttctcgttcgcaactgcaccatcactgccaatgctgagtgtgcctgtcgcaatggctggcagtgcagggacaaggagtgcaccgagtgtgatcctcttccaaacccttcgctgaccgctcggtcgtctcaggccctgagcccacaccctcagcccacccacttaccttatgtcagtgagatgctggaggccaggacagctgggcacatgcagactctggctgacttcaggcagctgcctgcccggactctctctacccactggccaccccaaagatccctgtgcagctccgattttattcgcatccttgtgatcttctctggaatgttccttgttttcaccctggccggggccctgttcctccatcaacgaaggaaatatagatcaaacaaaggagaaagtcctgtggagcctgcagagccttgtcgttacagctgccccagggaggaggagggcagcaccatccccatccaggaggattaccgaaaaccggagcctgcctgctccccctgagccagcacctgcgggagctgcactacagccctggcctccacccccaccccgccgaccatccaagggagagtgagacctggcagccacaactgcagtcccatcctcttgtcagggccctttcctgtgtacacgtgacagagtgccttttcgagactggcagggacgaggacaaatatggatgaggtggagagtgggaagcaggagcccagccagctgcgcctgcgctgcaggagggcgggggctctggttgtaaaacacacttcctgctgcgaaagacccacatgctacaagacgggcaaaataaagtgacagatgaccaccctgca

SEQ ID NO: 39 - protein, 260 aa, Homo sapiens
MARPHPWWLCVLGTLVGLSATPAPKSCPERHYWAQGKLCCQMCEPGTFLVKDCDQHRKAAQCDPCIPGVSFSPDHHTRPHCESCRHCNSGLLVRNCTITANAECACRNGWQCRDKECTECDPLPNPSLTARSSQALSPHPQPTHLPYVSEMLEARTAGHMQTLADFRQLPARTLSTHWPPQRSLCSSDFIRILVIFSGMFLVFTLAGALFLHQRRKYRSNKGESPVEPAEPCRYSCPREEEGSTIPIQEDYRKPEPACSP

SEQ ID NO: 40 - DNA, 2897 bp, Homo sapiens
  CDS (873)..(1712)
gcgagttgcggtagttgctgtgtaccatggtctcggaggtttctgtcccgcggcccgttaggtcctggtcgggttttcagcgaagcaggccgctcccctgcgtttcccagcgggcgtgctgtgccgcccaacaggctctgcctccaagtgccaaaaactcctagtaaagtttgcgcctcgcccgccgtccacaccccagcggccctgacgctgtcccctccgcgaccctcgcctctggaaaaagtgacaggcaaggccacgcccccgcgagggccggcctggagcccgcagcccccagggcctgggacggtgaggggcgtgaatgcggcggggggcggggccgttgccgggggagggggccggggcgcatgcgcgctgcgcagcggggctgaatgtttcccaagtgtttgaaactggtatttgggttttccacgttggacaagtgcggctcggcggccagcggagcgcgccccttcccgctgcccgctccgctcctctcttctacccagcccagtgggcgagtgggcagcggcggccgcggcgctgggccctctcccgccggtgtgtgcgcgctcgtacgcgcggcccccggcgccagccccgccgcctgagagggggcctgcgccgccggccggggcgtgcgcccgggagccaccgccaccgcggcccgcgccctcaggcgctggggtccccgcggacccggaggcggcggacgggctcggcagatgtagccgccgggccgaagcaggagccggcgggggggcgccgggagagcgagggctttgcattttgcagtgctattttttgaggggggcggggggtggaggaagcggaaagccgcgccgagtcgccggggacctccggggtgaaccatgttgagtcctgccaacggggagcagctccacctggtgaactatgtggaggactacctggactccatcgagtccctgcctttcgacttgcagagaaatgtctcgctgatgcgggagatcgacgcgaaataccaagagatcctgaaggagctagacgagtgctacgagcgcttcagtcgcgagacagacggggcgcagaagcggcggatgctgcactgtgtgcagcgcgcgctgatccgcagccaggagctgggcgacgagaagatccagatcgtgagccagatggtggagctggtggagaaccgcacgcggcaggtggacagccacgtggagctgttcgaggcgcagcaggagctgggcgacacagcgggcaacagcggcaaggctggcgcggacaggcccaaaggcgaggcggcagcgcaggctgacaagcccaacagcaagcgctcacggcggcagcgcaacaacgagaaccgtgagaacgcgtccagcaaccacgaccacgacgacggcgcctcgggcacacccaaggagaagaaggccaagacctccaagaagaagaagcgctccaaggccaaggcggagcgagaggcgtcccctgccgacctccccatcgaccccaacgaacccacgtactgtctgtgcaaccaggtctcctatggggagatgatcggctgcgacaacgacgagtgccccatcgagtggttccacttctcgtgcgtggggctcaatcataaacccaagggcaagtggtactgtcccaagtgccggggggagaacgagaagaccatggacaaagccctggagaaatccaaaaaagagagggcttacaacaggtagtttgtggacaggcgcctggtgtgaggaggacaaaataaaccgtgtatttattacattgctgcctttgttgaggtgcaaggagtgtaaaatgtatatttttaaagaatgttagaaaaggaaccattcctttcatagggatggcagtgattctgtttgccttttgttttcattggtacacgtgtaacaagaaagtggtctgtggatcagcattttagaaactacaaatataggtttgattcaacacttaagtctcagactgatttcttgcgggaggagggggactaaactcaacctaacacattaaatgtggaaggaaaatatttcatttagcttttttattttaatacaagtaatattattactttatgaacaattttttttaattggccatgtcgccaaaaatacagcctatagtaaatgtgtttcttgctgccatgatgtatatccatataacaattcagtaacaaaggtttaaagtttgaagattattttttaaaaaggtaaatggttaaattttacatgacagatattttatctattggcctgttccccaaatggccattttaaaatgcttgggtacacttctcttaagtggtctagtcaaggaacctcaagtcatgcttttgctatcaccaatcatagtgtacccatctttaatttatatcaggtgtataaatgtacatttccaaatgaacttgcacttgttatattataattggaagtgcagtcagcagatgctgttgtgaagctaatgtcacaattatgtgcaaaggtgtgcttcctgctgtatgtgagctgtaaaaatgttacgtgaagaaataaatgaaacttggccagtttgttcctctagtagtatatttaattttgacataagtaacttttaaaatttgtcttaaaaatttatacaccagcaatttagacaaagccttaagcaaattttgtattattgttctcacttattattaataatgaagtagaagttacttaattgccagcaaataaatacgtgtcaaaaaagaatctgtattcagaccctgggtcaggaaattactgcccacttgtcaagttcagcccaccatctgtttgaagattatatgaagtttaaattctagtgtccataaataaagtttcagcggaacacaaaaaaaaaaaaaaaaaaaaaaaaaaaaaaaaaaaaaaaaaaaa

SEQ ID NO: 41 - protein, 279 aa, Homo sapiens
MLSPANGEQLHLVNYVEDYLDSIESLPFDLQRNVSLMREIDAKYQEILKELDECYERFSRETDGAQKRRMLHCVQRALIRSQELGDEKIQIVSQMVELVENRTRQVDSHVELFEAQQELGDTAGNSGKAGADRPKGEAAAQADKPNSKRSRRQRNNENRENASSNHDHDDGASGTPKEKKAKTSKKKKRSKAKAEREASPADLPIDPNEPTYCLCNQVSYGEMIGCDNDECPIEWFHFSCVGLNHKPKGKWYCPKCRGENEKTMDKALEKSKKERAYNR

SEQ ID NO: 42 - DNA, 2213 bp, Homo sapiens
  CDS (396)..(1028)
gtcaggggctgaggagcgagttgcggtagttgctgtgtaccatggtctcggaggtttctgtcccgcggcccgttaggtcctggtcgggttttcagcgaagcaggccgctcccctgcgtttcccagcgggcgtgctgtgccgcccaacaggctctgcctccaagtgccaaaaactcctagtaaagtttgcgcctcgcccgccgtccacaccccagcggccctgacgctgtcccctccgcgaccctcgcctctggaaaaagtgacaggcaaggccacgcccccgcgagggccggcctggagcccgcagcccccagggcctgggacgagatcctgaaggagctagacgagtgctacgagcgcttcagtcgcgagacagacggggcgcagaagcggcggatgctgcactgtgtgcagcgcgcgctgatccgcagccaggagctgggcgacgagaagatccagatcgtgagccagatggtggagctggtggagaaccgcacgcggcaggtggacagccacgtggagctgttcgaggcgcagcaggagctgggcgacacagcgggcaacagcggcaaggctggcgcggacaggcccaaaggcgaggcggcagcgcaggctgacaagcccaacagcaagcgctcacggcggcagcgcaacaacgagaaccgtgagaacgcgtccagcaaccacgaccacgacgacggcgcctcgggcacacccaaggagaagaaggccaagacctccaagaagaagaagcgctccaaggccaaggcggagcgagaggcgtcccctgccgacctccccatcgaccccaacgaacccacgtactgtctgtgcaaccaggtctcctatggggagatgatcggctgcgacaacgacgagtgccccatcgagtggttccacttctcgtgcgtggggctcaatcataaacccaagggcaagtggtactgtcccaagtgccggggggagaacgagaagaccatggacaaagccctggagaaatccaaaaaagagagggcttacaacaggtagtttgtggacaggcgcctggtgtgaggaggacaaaataaaccgtgtatttattacattgctgcctttgttgaggtgcaaggagtgtaaaatgtatatttttaaagaatgttagaaaaggaaccattcctttcatagggatggcagtgattctgtttgccttttgttttcattggtacacgtgtaacaagaaagtggtctgtggatcagcattttagaaactacaaatataggtttgattcaacacttaagtctcagactgatttcttgcgggaggagggggactaaactcaacctaacacattaaatgtggaaggaaaatatttcatttagcttttttattttaatacaagtaatattattactttatgaacaattttttttaattggccatgtcgccaaaaatacagcctatagtaaatgtgtttcttgctgccatgatgtatatccatataacaattcagtaacaaaggtttaaagtttgaagattattttttaaaaaggtaaatggttaaattttacatgacagatattttatctattggcctgttccccaaatggccattttaaaatgcttgggtacacttctcttaagtggtctagtcaaggaacctcaagtcatgcttttgctatcaccaatcatagtgtacccatctttaatttatatcaggtgtataaatgtacatttccaaatgaacttgcacttgttatattataattggaagtgcagtcagcagatgctgttgtgaagctaatgtcacaattatgtgcaaaggtgtgcttcctgctgtatgtgagctgtaaaaatgttacgtgaagaaataaatgaaacttggccagtttgttcctctagtagtatatttaattttgacataagtaacttttaaaatttgtcttaaaaatttatacaccagcaatttagacaaagccttaagcaaattttgtattattgttctcacttattattaataatgaagtagaagttacttaattgccagcaaataaatacgtgtcaaaaaagaatctgtattcagaccctgggtcaggaaattactgcccacttgtcaagttcagcccaccatctgtttgaagattatatgaagtttaaattctagtgtccataaataaagtttcagcggaacacaaaaaaaaaaaaaaaaaaaaaaaaaaaaaaaaaaaaaaaaaaaa

SEQ ID NO: 43 - protein, 210 aa, Homo sapiens
MLHCVQRALIRSQELGDEKIQIVSQMVELVENRTRQVDSHVELFEAQQELGDTAGNSGKAGADRPKGEAAAQADKPNSKRSRRQRNNENRENASSNHDHDDGASGTPKEKKAKTSKKKKRSKAKAEREASPADLPIDPNEPTYCLCNQVSYGEMIGCDNDECPIEWFHFSCVGLNHKPKGKWYCPKCRGENEKTMDKALEKSKKERAYNR

SEQ ID NO: 44 - DNA, 2131 bp, Homo sapiens
  CDS (239)..(946)
cctccgagaacggtgtccatgacacagggcgggaagagataaggcctagggaaggcgcccctcgggcctatccacctcttctggggctcggcactaggaagcagcttccctctcaggcccctttgtctccaagccgttccaaactgagtaccgggagacgacacaaagggagggcggtgacggatggcgcaggcgcgggagccgcctaggctgctgggagtggtggtccggccgcggaatggagatcctgaaggagctagacgagtgctacgagcgcttcagtcgcgagacagacggggcgcagaagcggcggatgctgcactgtgtgcagcgcgcgctgatccgcagccaggagctgggcgacgagaagatccagatcgtgagccagatggtggagctggtggagaaccgcacgcggcaggtggacagccacgtggagctgttcgaggcgcagcaggagctgggcgacacagcgggcaacagcggcaaggctggcgcggacaggcccaaaggcgaggcggcagcgcaggctgacaagcccaacagcaagcgctcacggcggcagcgcaacaacgagaaccgtgagaacgcgtccagcaaccacgaccacgacgacggcgcctcgggcacacccaaggagaagaaggccaagacctccaagaagaagaagcgctccaaggccaaggcggagcgagaggcgtcccctgccgacctccccatcgaccccaacgaacccacgtactgtctgtgcaaccaggtctcctatggggagatgatcggctgcgacaacgacgagtgccccatcgagtggttccacttctcgtgcgtggggctcaatcataaacccaagggcaagtggtactgtcccaagtgccggggggagaacgagaagaccatggacaaagccctggagaaatccaaaaaagagagggcttacaacaggtagtttgtggacaggcgcctggtgtgaggaggacaaaataaaccgtgtatttattacattgctgcctttgttgaggtgcaaggagtgtaaaatgtatatttttaaagaatgttagaaaaggaaccattcctttcatagggatggcagtgattctgtttgccttttgttttcattggtacacgtgtaacaagaaagtggtctgtggatcagcattttagaaactacaaatataggtttgattcaacacttaagtctcagactgatttcttgcgggaggagggggactaaactcaacctaacacattaaatgtggaaggaaaatatttcatttagcttttttattttaatacaagtaatattattactttatgaacaattttttttaattggccatgtcgccaaaaatacagcctatagtaaatgtgtttcttgctgccatgatgtatatccatataacaattcagtaacaaaggtttaaagtttgaagattattttttaaaaaggtaaatggttaaattttacatgacagatattttatctattggcctgttccccaaatggccattttaaaatgcttgggtacacttctcttaagtggtctagtcaaggaacctcaagtcatgcttttgctatcaccaatcatagtgtacccatctttaatttatatcaggtgtataaatgtacatttccaaatgaacttgcacttgttatattataattggaagtgcagtcagcagatgctgttgtgaagctaatgtcacaattatgtgcaaaggtgtgcttcctgctgtatgtgagctgtaaaaatgttacgtgaagaaataaatgaaacttggccagtttgttcctctagtagtatatttaattttgacataagtaacttttaaaatttgtcttaaaaatttatacaccagcaatttagacaaagccttaagcaaattttgtattattgttctcacttattattaataatgaagtagaagttacttaattgccagcaaataaatacgtgtcaaaaaagaatctgtattcagaccctgggtcaggaaattactgcccacttgtcaagttcagcccaccatctgtttgaagattatatgaagtttaaattctagtgtccataaataaagtttcagcggaacacaaaaaaaaaaaaaaaaaaaaaaaaaaaaaaaaaaaaaaaaaaaa

SEQ ID NO: 45 - protein, 235 aa, Homo sapiens
MEILKELDECYERFSRETDGAQKRRMLHCVQRALIRSQELGDEKIQIVSQMVELVENRTRQVDSHVELFEAQQELGDTAGNSGKAGADRPKGEAAAQADKPNSKRSRRQRNNENRENASSNHDHDDGASGTPKEKKAKTSKKKKRSKAKAEREASPADLPIDPNEPTYCLCNQVSYGEMIGCDNDECPIEWFHFSCVGLNHKPKGKWYCPKCRGENEKTMDKALEKSKKERAYNR

SEQ ID NO: 46 - DNA, 2886 bp, Homo sapiens
  CDS (433)..(1701)
tgcgctcgggggggcgcgggcagatcgctggcttggagaggactgtggcaggtgagaggacctgtgcgtcgttctctgcagacctggccgccccgggtgtcagagagaggtggcgagttcgtgtccgccgggaattgttggctgttggggaaactttcctgcgaggtcagtcaaggctttgggggctctgttttgaatgtggatcaccactcggagtttactaatgtttacaaggctgcgcagtagggaaacggaagagttgggtgggggcaaaaaaaaaaattgaccgctatccccgaaagtactagacgcctctgccgggaaggcgcccctgcgcgttctatccgagacgtagcttcgcagcgaattttataggaacttcattagcatattatggaacgtcccgcctcagccccccagtagttggctgtgatgtccttcgtggaatgtccttatcattcccctgcggaacgattggtcgctgaggcggatgaaggcgggcctagcgcaataactggtatgggtctgtgtttccgctgtcttcttttttctttttcggggaggagcggggtggagggtggacgagttgatttgaacgtcttcgggtcgctcggcctccagccttggattggttcttctcgctgctggggcgggccgtgctcttccgccctgcggtgtggttggttctcctcctggcctccgccctccaaatcggcgattcccataggcggcggctctcggggtgcggggcgagtctcccgctggcctcctccccattggctggaggcctggcgggtgtcgcccctgcccctctccccgctcagcccggccactttcgggcgcggatttatagcagtagcagtgatcccgggcctgtgggctcggggccggggctgcagttcggaccgcctcccgcgacccgcggggccggctcggagacagtttcaggccgcatctctgctgacccgagggtggggccgcgcgtggccgtggaaacagatcctgaaggagctagacgagtgctacgagcgcttcagtcgcgagacagacggggcgcagaagcggcggatgctgcactgtgtgcagcgcgcgctgatccgcagccaggagctgggcgacgagaagatccagatcgtgagccagatggtggagctggtggagaaccgcacgcggcaggtggacagccacgtggagctgttcgaggcgcagcaggagctgggcgacacagcgggcaacagcggcaaggctggcgcggacaggcccaaaggcgaggcggcagcgcaggctgacaagcccaacagcaagcgctcacggcggcagcgcaacaacgagaaccgtgagaacgcgtccagcaaccacgaccacgacgacggcgcctcgggcacacccaaggagaagaaggccaagacctccaagaagaagaagcgctccaaggccaaggcggagcgagaggcgtcccctgccgacctccccatcgaccccaacgaacccacgtactgtctgtgcaaccaggtctcctatggggagatgatcggctgcgacaacgacgagtgccccatcgagtggttccacttctcgtgcgtggggctcaatcataaacccaagggcaagtggtactgtcccaagtgccggggggagaacgagaagaccatggacaaagccctggagaaatccaaaaaagagagggcttacaacaggtagtttgtggacaggcgcctggtgtgaggaggacaaaataaaccgtgtatttattacattgctgcctttgttgaggtgcaaggagtgtaaaatgtatatttttaaagaatgttagaaaaggaaccattcctttcatagggatggcagtgattctgtttgccttttgttttcattggtacacgtgtaacaagaaagtggtctgtggatcagcattttagaaactacaaatataggtttgattcaacacttaagtctcagactgatttcttgcgggaggagggggactaaactcaacctaacacattaaatgtggaaggaaaatatttcatttagcttttttattttaatacaagtaatattattactttatgaacaattttttttaattggccatgtcgccaaaaatacagcctatagtaaatgtgtttcttgctgccatgatgtatatccatataacaattcagtaacaaaggtttaaagtttgaagattattttttaaaaaggtaaatggttaaattttacatgacagatattttatctattggcctgttccccaaatggccattttaaaatgcttgggtacacttctcttaagtggtctagtcaaggaacctcaagtcatgcttttgctatcaccaatcatagtgtacccatctttaatttatatcaggtgtataaatgtacatttccaaatgaacttgcacttgttatattataattggaagtgcagtcagcagatgctgttgtgaagctaatgtcacaattatgtgcaaaggtgtgcttcctgctgtatgtgagctgtaaaaatgttacgtgaagaaataaatgaaacttggccagtttgttcctctagtagtatatttaattttgacataagtaacttttaaaatttgtcttaaaaatttatacaccagcaatttagacaaagccttaagcaaattttgtattattgttctcacttattattaataatgaagtagaagttacttaattgccagcaaataaatacgtgtcaaaaaagaatctgtattcagaccctgggtcaggaaattactgcccacttgtcaagttcagcccaccatctgtttgaagattatatgaagtttaaattctagtgtccataaataaagtttcagcggaacacaaaaaaaaaaaaaaaaaaaaaaaaaaaaaaaaaaaaaaaaaaaa

SEQ ID NO: 47 - protein, 422 aa, Homo sapiens
MSFVECPYHSPAERLVAEADEGGPSAITGMGLCFRCLLFSFSGRSGVEGGRVDLNVFGSLGLQPWIGSSRCWGGPCSSALRCGWFSSWPPPSKSAIPIGGGSRGAGRVSRWPPPHWLEAWRVSPLPLSPLSPATFGRGFIAVAVIPGLWARGRGCSSDRLPRPAGPARRQFQAASLLTRGWGRAWPWKQILKELDECYERFSRETDGAQKRRMLHCVQRALIRSQELGDEKIQIVSQMVELVENRTRQVDSHVELFEAQQELGDTAGNSGKAGADRPKGEAAAQADKPNSKRSRRQRNNENRENASSNHDHDDGASGTPKEKKAKTSKKKKRSKAKAEREASPADLPIDPNEPTYCLCNQVSYGEMIGCDNDECPIEWFHFSCVGLNHKPKGKWYCPKCRGENEKTMDKALEKSKKERAYNR

SEQ ID NO: 48 - DNA, 2100 bp, Homo sapiens
  CDS (64)..(1305)
gcggaagtggcggcggcgccggcctggcctggcctggctgaggggaggcggcgggcgggcgcgatggcggaggccgggccacaggcgccgccgcccccgggcactccaagccggcacgaaaagagcctgggactgctcaccaccaagttcgtgtcccttctgcaggaggccaaggacggcgtgcttgacctcaagctggcagctgacaccctagctgtacgccagaagcggcggatttacgacattaccaatgttttggaaggtatcgggctaatcgagaaaaagtccaagaacagcatccagtggaagggtgtggggcctggctgcaatacccgggagattgctgacaaactgattgagctcaaggcagagatcgaggagctgcagcagcgggagcaagaactagaccagcacaaggtgtgggtgcagcagagcatccggaacgtcacagaggacgtgcagaacagctgtttggcctacgtcactcatgaggacatctgcagatgctttgctggagataccctcttggccatccgggccccatcaggcaccagcctggaggtgcccatcccagagggtctcaatgggcagaagaagtaccagattcacctgaagagtgtgagtggtcccattgaggttctgctggtgaacaaggaggcatggagctcaccccctgtggctgtgcctgtgccaccacctgaagatttgctccagagcccatctgctgtttctacacctccacctctgcccaagcctgccctagcccagtcccaggaagcctcacgtccaaatagtcctcagctcactcccactgctgtccctggcagtgcagaagtccagggaatggctggcccagcagctgagatcacagtgagtggcggccctgggactgatagcaaggacagtggtgagctcagttcactcccactgggcccaacaacactggacacccggccactgcagtcttctgccctgctggacagcagcagcagcagcagcagcagcagcagcagcagcagcaacagtaacagcagcagttcgtccggacccaacccttctacctcctttgagcccatcaaggcagaccccacaggtgttttggaactccccaaagagctgtcagaaatctttgatcccacacgagagtgcatgagctcggagctgctggaggagttgatgtcctcagaagtgtttgcccctctgcttcgtctttctccacccccgggagaccacgattatatctacaacctggacgagagtgaaggtgtctgtgacctctttgatgtgcctgttctcaacctctgactgacagggacatgccctgtgtggctgggacccagactgtctgacctgggggttgcctggggacctctcccacccgacccctacagagcttgagagccacagacgcctggcttctccggcctcccctcaccgcacagttctggccacagctcccgctcctgtgctggcacttctgtgctcgcagagcaggggaacaggactcagcccccatcaccgtggagccaaagtgtttgcttctccctttctgcggccttcgccagcccaggctcggctgccacccagtggcacagaaccgaggagctgccattaccccccatagggggcagtgtcttgttcctgccagcctcagtgtcttgcttctgccagctccttcccctaggagggaagggtggggtggaactgggcacatgccagcaccacttctagcttccttcgctatcccccaccccctgaccctccagctcctcctggccctctcacgtgcccacttctgctgggcctttagccctagaacctgcaggtggtgggggcggctaccaagaaggaacagaggtctctggggaggagtctgggtggtccagccctgatgattggccccacctcctgctgccccataaccctctcttcatttcggctttttcatttaccctcatttagagccatttgcagagatttagaaagatttacagtaacgaatggattcctatataaagattatttttatactttttgcagcaaaaggaaattgtaatatttgtacagtgttcaagtgaataaaaaccatgcctaaggcta

SEQ ID NO: 49 - protein, 413 aa, Homo sapiens
MAEAGPQAPPPPGTPSRHEKSLGLLTTKFVSLLQEAKDGVLDLKLAADTLAVRQKRRIYDITNVLEGIGLIEKKSKNSIQWKGVGPGCNTREIADKLIELKAEIEELQQREQELDQHKVWVQQSIRNVTEDVQNSCLAYVTHEDICRCFAGDTLLAIRAPSGTSLEVPIPEGLNGQKKYQIHLKSVSGPIEVLLVNKEAWSSPPVAVPVPPPEDLLQSPSAVSTPPPLPKPALAQSQEASRPNSPQLTPTAVPGSAEVQGMAGPAAEITVSGGPGTDSKDSGELSSLPLGPTTLDTRPLQSSALLDSSSSSSSSSSSSSNSNSSSSSGPNPSTSFEPIKADPTGVLELPKELSEIFDPTRECMSSELLEELMSSEVFAPLLRLSPPPGDHDYIYNLDESEGVCDLFDVPVLNL

SEQ ID NO: 50 - DNA, 1760 bp, Homo sapiens
  CDS (73)..(1728)
ggcgaatggctcgtctgtagtgcacgccgcgggcccagctgcgaccccggccccgcccccgggaccccggccatggacgaactgttccccctcatcttcccggcagagccagcccaggcctctggcccctatgtggagatcattgagcagcccaagcagcggggcatgcgcttccgctacaagtgcgaggggcgctccgcgggcagcatcccaggcgagaggagcacagataccaccaagacccaccccaccatcaagatcaatggctacacaggaccagggacagtgcgcatctccctggtcaccaaggaccctcctcaccggcctcacccccacgagcttgtaggaaaggactgccgggatggcttctatgaggctgagctctgcccggaccgctgcatccacagtttccagaacctgggaatccagtgtgtgaagaagcgggacctggagcaggctatcagtcagcgcatccagaccaacaacaaccccttccaagttcctatagaagagcagcgtggggactacgacctgaatgctgtgcggctctgcttccaggtgacagtgcgggacccatcaggcaggcccctccgcctgccgcctgtccttcctcatcccatctttgacaatcgtgcccccaacactgccgagctcaagatctgccgagtgaaccgaaactctggcagctgcctcggtggggatgagatcttcctactgtgtgacaaggtgcagaaagaggacattgaggtgtatttcacgggaccaggctgggaggcccgaggctccttttcgcaagctgatgtgcaccgacaagtggccattgtgttccggacccctccctacgcagaccccagcctgcaggctcctgtgcgtgtctccatgcagctgcggcggccttccgaccgggagctcagtgagcccatggaattccagtacctgccagatacagacgatcgtcaccggattgaggagaaacgtaaaaggacatatgagaccttcaagagcatcatgaagaagagtcctttcagcggacccaccgacccccggcctccacctcgacgcattgctgtgccttcccgcagctcagcttctgtccccaagccagcaccccagccctatccctttacgtcatccctgagcaccatcaactatgatgagtttcccaccatggtgtttccttctgggcagatcagccaggcctcggccttggccccggcccctccccaagtcctgccccaggctccagcccctgcccctgctccagccatggtatcagctctggcccaggccccagcccctgtcccagtcctagccccaggccctcctcaggctgtggccccacctgcccccaagcccacccaggctggggaaggaacgctgtcagaggccctgctgcagctgcagtttgatgatgaagacctgggggccttgcttggcaacagcacagacccagctgtgttcacagacctggcatccgtcgacaactccgagtttcagcagctgctgaaccagggcatacctgtggccccccacacaactgagcccatgctgatggagtaccctgaggctataactcgcctagtgacaggggcccagaggccccccgacccagctcctgctccactgggggccccggggctccccaatggcctcctttcaggagatgaagacttctcctccattgcggacatggacttctcagccctgctgagtcagatcagctcctaagggggtgacgcctgccctccccagagcactgg

SEQ ID NO: 51 - protein, 551 aa, Homo sapiens
MDELFPLIFPAEPAQASGPYVEIIEQPKQRGMRFRYKCEGRSAGSIPGERSTDTTKTHPTIKINGYTGPGTVRISLVTKDPPHRPHPHELVGKDCRDGFYEAELCPDRCIHSFQNLGIQCVKKRDLEQAISQRIQTNNNPFQVPIEEQRGDYDLNAVRLCFQVTVRDPSGRPLRLPPVLPHPIFDNRAPNTAELKICRVNRNSGSCLGGDEIFLLCDKVQKEDIEVYFTGPGWEARGSFSQADVHRQVAIVFRTPPYADPSLQAPVRVSMQLRRPSDRELSEPMEFQYLPDTDDRHRIEEKRKRTYETFKSIMKKSPFSGPTDPRPPPRRIAVPSRSSASVPKPAPQPYPFTSSLSTINYDEFPTMVFPSGQISQASALAPAPPQVLPQAPAPAPAPAMVSALAQAPAPVPVLAPGPPQAVAPPAPKPTQAGEGTLSEALLQLQFDDEDLGALLGNSTDPAVFTDLASVDNSEFQQLLNQGIPVAPHTTEPMLMEYPEAITRLVTGAQRPPDPAPAPLGAPGLPNGLLSGDEDFSSIADMDFSALLSQISS

SEQ ID NO: 52 - DNA, 1968 bp, Homo sapiens
  CDS (145)..(1317)
atttcctcatcgtcaagctttgttcctcgtgggggctagaaatctctttccagttccagattgtgaagggttcctgagtaagcagcgtgtctccatccccctctctaggggctcttggatggaccttgcactctagaagggacaatggacttctggctttggccactttacttcctgccagtatcgggggccctgaggatcctcccagaagtaaaggtagagggggagctgggcggatcagttaccatcaagtgcccacttcctgaaatgcatgtgaggatatatctgtgccgggagatggctggatctggaacatgtggtaccgtggtatccaccaccaacttcatcaaggcagaatacaagggccgagttactctgaagcaatacccacgcaagaatctgttcctagtggaggtaacacagctgacagaaagtgacagcggagtctatgcctgcggagcgggcatgaacacagaccggggaaagacccagaaagtcaccctgaatgtccacagtgaatacgagccatcatgggaagagcagccaatgcctgagactccaaaatggtttcatctgccctatttgttccagatgcctgcatatgccagttcttccaaattcgtaaccagagttaccacaccagctcaaaggggcaaggtccctccagttcaccactcctcccccaccacccaaatcacccaccgccctcgagtgtccagagcatcttcagtagcaggtgacaagccccgaaccttcctgccatccactacagcctcaaaaatctcagctctggaggggctgctcaagccccagacgcccagctacaaccaccacaccaggctgcacaggcagagagcactggactatggctcacagtctgggagggaaggccaaggatttcacatcctgatcccgaccatcctgggccttttcctgctggcacttctggggctggtggtgaaaagggccgttgaaaggaggaaagccctctccaggcgggcccgccgactggccgtgaggatgcgcgccctggagagctcccagaggccccgcgggtcgccgcgaccgcgctcccaaaacaacatctacagcgcctgcccgcggcgcgctcgtggagcggacgctgcaggcacaggggaggcccccgttcccggccccggagcgccgttgccccccgccccgctgcaggtgtctgaatctccctggctccatgccccatctctgaagaccagctgtgaatacgtgagcctctaccaccagcctgccgccatgatggaggacagtgattcagatgactacatcaatgttcctgcctgacaactccccagctatcccccaaccccaggctcggactgtggtgccaaggagtctcatctatctgctgatgtccaatacctgcttcatgtgttctcagagccctcatcacttcccatgccccatctcgactcccatccccatctatctgtgccctgagcatggctctgcccccaggtcgtcttgcacaccttggcagccccctgtagttgacaggtaagctgtaggcatgtagagcaattgtcccaatgccacttgcttcctttccaagccgtcgaacagactgtgggatttgcagagtgtttcttccatgtctttgaccacagggttgttgctgcccaggctctagatcacatggcatcaggctggggcagaggcatagctattgtctcgggcatccttcccagggttgggtcttacacaaatagaaggctcttgctctgagttatgtgacatgcctcagccccatggactaagcaggggtctggtataaaaacactcctggaaacgcctttgccctgatccaaatgttagcacttgctagtgaacgtctacttatctcaagttctatgctaaaggcaatttatcttgatgtgatgataaaccaaacttattagcaagatatgcatatatatcaaaaaaaaaaaaaaaaaa

SEQ ID NO: 53 - protein, 390 aa, Homo sapiens
MDFWLWPLYFLPVSGALRILPEVKVEGELGGSVTIKCPLPEMHVRIYLCREMAGSGTCGTVVSTTNFIKAEYKGRVTLKQYPRKNLFLVEVTQLTESDSGVYACGAGMNTDRGKTQKVTLNVHSEYEPSWEEQPMPETPKWFHLPYLFQMPAYASSSKFVTRVTTPAQRGKVPPVHHSSPTTQITHRPRVSRASSVAGDKPRTFLPSTTASKISALEGLLKPQTPSYNHHTRLHRQRALDYGSQSGREGQGFHILIPTILGLFLLALLGLVVKRAVERRKALSRRARRLAVRMRALESSQRPRGSPRPRSQNNIYSACPRRARGADAAGTGEAPVPGPGAPLPPAPLQVSESPWLHAPSLKTSCEYVSLYHQPAAMMEDSDSDDYINVPA

SEQ ID NO: 54 - DNA, 1655 bp, Homo sapiens
  CDS (115)..(1326)
aatttctcactgcccctgtgataaactgtggtcactggctgtggcagcaactattataagatgctctgaaaactcttcagacactgaggggcaccagaggagcagactacaagaatggcacacgctatggaaaactcctggacaatcagtaaagagtaccatattgatgaagaagtgggctttgctctgccaaatccacaggaaaatctacctgatttttataatgactggatgttcattgctaaacatctgcctgatctcatagagtctggccagcttcgagaaagagttgagaagttaaacatgctcagcattgatcatctcacagaccacaagtcacagcgccttgcacgtctagttctgggatgcatcaccatggcatatgtgtggggcaaaggtcatggagatgtccgtaaggtcttgccaagaaatattgctgttccttactgccaactctccaagaaactggaactgcctcctattttggtttatgcagactgtgtcttggcaaactggaagaaaaaggatcctaataagcccctgacttatgagaacatggacgttttgttctcatttcgtgatggagactgcagtaaaggattcttcctggtctctctattggtggaaatagcagctgcttctgcaatcaaagtaattcctactgtattcaaggcaatgcaaatgcaagaacgggacactttgctaaaggcgctgttggaaatagcttcttgcttggagaaagcccttcaagtgtttcaccaaatccacgatcatgtgaacccaaaagcatttttcagtgttcttcgcatatatttgtctggctggaaaggcaacccccagctatcagacggtctggtgtatgaagggttctgggaagacccaaaggagtttgcagggggcagtgcaggccaaagcagcgtctttcagtgctttgacgtcctgctgggcatccagcagactgctggtggaggacatgctgctcagttcctccaggacatgagaagatatatgccaccagctcacaggaacttcctgtgctcattagagtcaaatccctcagtccgtgagtttgtcctttcaaaaggtgatgctggcctgcgggaagcttatgacgcctgtgtgaaagctctggtctccctgaggagctaccatctgcaaatcgtgactaagtacatcctgattcctgcaagccagcagccaaaggagaataagacctctgaagacccttcaaaactggaagccaaaggaactggaggcactgatttaatgaatttcctgaagactgtaagaagtacaactgagaaatcccttttgaaggaaggttaatgtaacccaacaagagcacattttatcatagcagagacatctgtatgcattcctgtcattacccattgtaacagagccacaaactaatactatgcaatgttttaccaataatgcaatacaaaagacctcaaaatacctgtgcatttcttgtaggaaaacaacaaaaggtaattatgtgtaattatactagaagttttgtaatctgtatcttatcattggaataaaatgacattcaataaataaaaaaaaaaaaaaaaaaaaaaaaaaaaaaaaaaaaaaaaaaaaaaaaaaaaaaaaaaaaaaaaaaaaaaaaaaaaaaaaaaaaaaaa

SEQ ID NO: 55 - protein, 403 aa, Homo sapiens [sequence omitted]

SEQ ID NO: 56 - DNA, 2820 bp, Homo sapiens
  CDS (238)..(1278)
ggcgggttcgcgccccgaaggctgagagctggcgctgctcgtgccctgtgtgccagacggcggagctccgcggccggaccccgcggccccgctttgctgccgactggagtttgggggaagaaactctcctgcgccccagaagatttcttcctcggcgaagggacagcgaaagatgagggtggcaggaagagaaggcgctttctgtctgccggggtcgcagcgcgagagggcagtgccatgttcctctccatcctagtggcgctgtgcctgtggctgcacctggcgctgggcgtgcgcggcgcgccctgcgaggcggtgcgcatccctatgtgccggcacatgccctggaacatcacgcggatgcccaaccacctgcaccacagcacgcaggagaacgccatcctggccatcgagcagtacgaggagctggtggacgtgaactgcagcgccgtgctgcgcttcttcttctgtgccatgtacgcgcccatttgcaccctggagttcctgcacgaccctatcaagccgtgcaagtcggtgtgccaacgcgcgcgcgacgactgcgagcccctcatgaagatgtacaaccacagctggcccgaaagcctggcctgcgacgagctgcctgtctatgaccgtggcgtgtgcatttcgcctgaagccatcgtcacggacctcccggaggatgttaagtggatagacatcacaccagacatgatggtacaggaaaggcctcttgatgttgactgtaaacgcctaagccccgatcggtgcaagtgtaaaaaggtgaagccaactttggcaacgtatctcagcaaaaactacagctatgttattcatgccaaaataaaagctgtgcagaggagtggctgcaatgaggtcacaacggtggtggatgtaaaagagatcttcaagtcctcatcacccatccctcgaactcaagtcccgctcattacaaattcttcttgccagtgtccacacatcctgccccatcaagatgttctcatcatgtgttacgagtggcgttcaaggatgatgcttcttgaaaattgcttagttgaaaaatggagagatcagcttagtaaaagatccatacagtgggaagagaggctgcaggaacagcggagaacagttcaggacaagaagaaaacagccgggcgcaccagtcgtagtaatccccccaaaccaaagggaaagcctcctgctcccaaaccagccagtcccaagaagaacattaaaactaggagtgcccagaagagaacaaacccgaaaagagtgtgagctaactagtttccaaagcggagacttccgacttccttacaggatgaggctgggcattgcctgggacagcctatgtaaggccatgtgccccttgccctaacaactcactgcagtgctcttcatagacacatcttgcagcatttttcttaaggctatgcttcagtttttctttgtaagccatcacaagccatagtggtaggtttgccctttggtacagaaggtgagttaaagctggtggaaaaggcttattgcattgcattcagagtaacctgtgtgcatactctagaagagtagggaaaataatgcttgttacaattcgacctaatatgtgcattgtaaaataaatgccatatttcaaacaaaacacgtaatttttttacagtatgttttattaccttttgatatctgttgttgcaatgttagtgatgttttaaaatgtgatgaaaatataatgtttttaagaaggaacagtagtggaatgaatgttaaaagatctttatgtgtttatggtctgcagaaggatttttgtgatgaaaggggattttttgaaaaattagagaagtagcatatggaaaattataatgtgtttttttaccaatgacttcagtttctgtttttagctagaaacttaaaaacaaaaataataataaagaaaaataaataaaaaggagaggcagacaatgtctggattcctgttttttggttacctgatttccatgatcatgatgcttcttgtcaacaccctcttaagcagcaccagaaacagtgagtttgtctgtaccattaggagttaggtactaattagttggctaatgctcaagtattttatacccacaagagaggtatgtcactcatcttacttcccaggacatccaccctgagaataatttgacaagcttaaaaatggccttcatgtgagtgccaaattttgtttttcttcatttaaatattttctttgcctaaatacatgtgagaggagttaaatataaatgtacagagaggaaagttgagttccacctctgaaatgagaattacttgacagttgggatactttaatcagaaaaaaagaacttatttgcagcattttatcaacaaatttcataattgtggacaattggaggcatttattttaaaaaacaattttattggccttttgctaacacagtaagcatgtattttataaggcattcaataaatgcacaacgcccaaaggaaataaaatcctatctaatcctactctccactacacagaggtaatcactattagtattttggcatattattctccaggtgtttgcttatgcacttataaaatgatttgaacaaataaaactaggaacctgtatacatgtgtttcataacctgcctcctttgcttggccctttattgagataagttttcctgtcaagaaagcagaaaccatctcatttctaacagctgtgttatattccatagtatgcattactcaacaaactgttgtgctattggatacttaggtggtttcttcactgacaatactgaataaacatctcaccggaattc

SEQ ID NO: 57 - protein, 346 aa, Homo sapiens
MFLSILVALCLWLHLALGVRGAPCEAVRIPMCRHMPWNITRMPNHLHHSTQENAILAIEQYEELVDVNCSAVLRFFFCAMYAPICTLEFLHDPIKPCKSVCQRARDDCEPLMKMYNHSWPESLACDELPVYDRGVCISPEAIVTDLPEDVKWIDITPDMMVQERPLDVDCKRLSPDRCKCKKVKPTLATYLSKNYSYVIHAKIKAVQRSGCNEVTTVVDVKEIFKSSSPIPRTQVPLITNSSCQCPHILPHQDVLIMCYEWRSRMMLLENCLVEKWRDQLSKRSIQWEERLQEQRRTVQDKKKTAGRTSRSNPPKPKGKPPAPKPASPKKNIKTRSAQKRTNPKRV

SEQ ID NO: 58 - DNA, 2869 bp, Homo sapiens
  CDS (505)..(2415)
cccttctccccggcggttagtgctgagagtgcggagtgtgtgctccgggctcggaacacacatttattattaaaaaatccaaaaaaaatctaaaaaaatcttttaaaaaaccccaaaaaaatttacaaaaaatccgcgtctcccccgccggagacttttattttttttcttcctcttttataaaataacccggtgaagcagccgagaccgacccgcccgcccgcggccccgcagcagctccaagaaggaaccaagagaccgaggccttcccgctgcccggacccgacaccgccaccctcgctccccgccggcagccggcagccagcggcagtggatcgaccccgttctgcggccgttgagtagttttcaattccggttgatttttgtccctctgcgcttgctccccgctcccctccccccggctccggcccccagccccggcactcgctctcctcctctcacggaaaggtcgcggcctgtggccctgcgggcagccgtgccgagatgaaccccagtgcccccagctaccccatggcctcgctctacgtgggggacctccaccccgacgtgaccgaggcgatgctctacgagaagttcagcccggccgggcccatcctctccatccgggtctgcagggacatgatcacccgccgctccttgggctacgcgtatgtgaacttccagcagccggcggacgcggagcgtgctttggacaccatgaattttgatgttataaagggcaagccagtacgcatcatgtggtctcagcgtgatccatcacttcgcaaaagtggagtaggcaacatattcattaaaaatctggacaaatccattgataataaagcactgtatgatacattttctgcttttggtaacatcctttcatgtaaggtggtttgtgatgaaaatggttccaagggctatggatttgtacactttgagacgcaggaagcagctgaaagagctattgaaaaaatgaatggaatgctcctaaatgatcgcaaagtatttgttggacgatttaagtctcgtaaagaacgagaagctgaacttggagctagggcaaaagaattcaccaatgtttacatcaagaattttggagaagacatggatgatgagcgccttaaggatctctttggcaagtttgggcctgccttaagtgtgaaagtaatgactgatgaaagtggaaaatccaaaggatttggatttgtaagctttgaaaggcatgaagatgcacagaaagctgtggatgagatgaacggaaaggagctcaatggaaaacaaatttatgttggtcgagctcagaaaaaggtggaacggcagacggaacttaagcgcaaatttgaacagatgaaacaagataggatcaccagataccagggtgttaatctttatgtgaaaaatcttgatgatggtattgatgatgaacgtctccggaaagagttttctccatttggtacaatcactagtgcaaaggttatgatggagggtggtcgcagcaaagggtttggttttgtatgtttctcctccccagaagaagccactaaagcagttacagaaatgaacggtagaattgtggccacaaagccattgtatgtagctttagctcagcgcaaagaagagcgccaggctcacctcactaaccagtatatgcagagaatggcaagtgtacgagctgttcccaaccctgtaatcaacccctaccagccagcacctccttcaggttacttcatggcagctatcccacagactcagaaccgtgctgcatactatcctcctagccaaattgctcaactaagaccaagtcctcgctggactgctcagggtgccagacctcatccattccaaaatatgcccggtgctatccgcccagctgctcctagaccaccatttagtactatgagaccagcttcttcacaggttccacgagtcatgtcaacacagcgtgttgctaacacatcaacacagacaatgggtccacgtcctgcagctgcagccgctgcagctactcctgctgtccgcaccgttccacagtataaatatgctgcaggagttcgcaatcctcagcaacatcttaatgcacagccacaagttacaatgcaacagcctgctgttcatgtacaaggtcaggaacctttgactgcttccatgttggcatctgcccctcctcaagagcaaaagcaaatgttgggtgaacggctgtttcctcttattcaagccatgcaccctactcttgctggtaaaatcactggcatgttgttggagattgataattcagaacttcttcatatgctcgagtctccagagtcactccgttctaaggttgatgaagctgtagctgtactacaagcccaccaagctaaagaggctgcccagaaagcagttaacagtgccaccggtgttccaactgtttaaaattgatcagggaccatgaaaagaaacttgtgcttcaccgaagaaaaatatctaaacatcgaaaaacttaaatattatggaaaaaaaacattgcaaaatataaaataaataaaaaaaggaaaggaaactttgaaccttatgtaccgagcaaatgccaggtctagcaaacataatgctagtcctagattacttattgatttaaaaacaaaaaaacacaaaaaaatagtaaaatataaaaacaaattaatgttttatagaccctgggaaaaagaattttcagcaaagtacaaaaatttaaagcattcctttctttaattttgtaattctttactgtggaatagctcagaatgtcagttctgttttaagtaacagaattgataactgagcaaggaaacgtaatttggattataaaattcttgctttaataaaaattccttaaacagtgaaaaaaaaa

SEQ ID NO: 59 - protein, 636 aa, Homo sapiens
MNPSAPSYPMASLYVGDLHPDVTEAMLYEKFSPAGPILSIRVCRDMITRRSLGYAYVNFQQPADAERALDTMNFDVIKGKPVRIMWSQRDPSLRKSGVGNIFIKNLDKSIDNKALYDTFSAFGNILSCKVVCDENGSKGYGFVHFETQEAAERAIEKMNGMLLNDRKVFVGRFKSRKEREAELGARAKEFTNVYIKNFGEDMDDERLKDLFGKFGPALSVKVMTDESGKSKGFGFVSFERHEDAQKAVDEMNGKELNGKQIYVGRAQKKVERQTELKRKFEQMKQDRITRYQGVNLYVKNLDDGIDDERLRKEFSPFGTITSAKVMMEGGRSKGFGFVCFSSPEEATKAVTEMNGRIVATKPLYVALAQRKEERQAHLTNQYMQRMASVRAVPNPVINPYQPAPPSGYFMAAIPQTQNRAAYYPPSQIAQLRPSPRWTAQGARPHPFQNMPGAIRPAAPRPPFSTMRPASSQVPRVMSTQRVANTSTQTMGPRPAAAAAAATPAVRTVPQYKYAAGVRNPQQHLNAQPQVTMQQPAVHVQGQEPLTASMLASAPPQEQKQMLGERLFPLIQAMHPTLAGKITGMLLEIDNSELLHMLESPESLRSKVDEAVAVLQAHQAKEAAQKAVNSATGVPTV

SEQ ID NO: 60 - DNA, 4024 bp, Homo sapiens
  CDS (464)..(1042)
gtgaggctgccgagcggacagcgactcccggggaagcccgcgctccgggagcgggagcgggagcaggagcaggagcagcgccgtcccaggccagaggcgagcgccgggcgccgggagagcggagagcccgggcagctgccggagcgcgggggcgcggcccgaggaaaccacagagcgagcccaggcctggggagggcgccgaacatctgaggcggcttcgcgggagacaaagccgcgcgtagagacgcgatgcccgccgatcgcgagcccggccggcgagggcgcggggactgcggcgtctgagcgcgccaagccgtgcgcccgcggggacgccgagccccggggccggtgcgggcggcggcgggcggggcccaggtgcgcccggccgcgtcgggcccgtgactgctcggggggcggcgccctcccgccgcagccgcagtggctggcgccgcagccaggagccatgggcaacatctcctctaacatctcggccttccagtccctgcatatcgtcatgttgggcttggactcggccggcaagaccacggtgctctaccggctcaagttcaacgagttcgtgaacacggtgcccaccatcggcttcaacaccgagaagatcaagctgagcaacggcacggccaagggcatcagctgccacttctgggacgtgggcggccaggagaagctgcggccgctgtggaagtcctacagccgctgcacggacggcatcatctacgtggtggactcggtggacgtggaccggctggaggaggccaagacggagctgcacaaggtgaccaagttcgccgagaaccagggcacgccgctgctggtcatcgccaacaagcaggacctgcccaagtcgctgccggtggcagagattgagaagcagctggcgctgcacgagcttatcccggccaccacctatcacgtccagccggcgtgcgccatcatcggcgagggcctcaccgagggcatggacaagctctatgagatgatcctgaaacgcaggaagtccctcaagcagaagaagaagcggtaatgcgcccggagcgaccggggagcgagcgagtgcgtcaagaaagaatgaatggatggatggatggttggatggatggatggatggatgagcgagaacccgcgcccgcgaacaaagagcgaaccaaagcgatgcttcgaatttttaaaacggaatctctgcacccaaatgcaggactggtgacttaaggagctgcgaagtctgatttaccggcctactctcgacctgccccccacccccagctcaggggaccttttgtctgaacgccagagctactgaccaggtcggggggccgcggtggggagtggaagagccggtcctgctgtccgccctcccagccccaggtggaaggctcagttgtcggaaagacaaaagcgatttcttcccactcctgcagggccagaagttcaggctgccccgcctccactgggggatcgcacctgtgaattacctgaggtatgcatttcccagaaccgtgggcgtacccaccttggggggcatgttggttctggggggaccacctctccttgcattcaggggctgtgaagctgagtaattttcggtcacagggcaggcccctgttgaaatttcatttgtcctgctctgggcccaaaggtggtggtggtttgggtcatcagaggactgcctgggacggttcagcgggcacggagcgctgtgctggcctggctggggatggccgcggaggtgcccttttcctggtgctttgtggtggctgcagaagaccagttttgttgagaactgcttttcagcctggaatcagacatcttccagatggtttggaccctgtccatgtgtaggtcattatcacacaaagagaccaataaaaataaaaaaaataaaaaaaaaaaaagacgaactattggaggtggtggccaatgatgcatttactgtttgcaggatagttaaaggtgtttaaagggtaaggcttttggtgtaaatgctggatggggtgtgtgtgtgtgtggatatagggacctccctctgtactgtgtactgtgtaatcggcattaatacctagactcatatgtatggaattttaaattctcttagcctactgattggtttggatgagcacaccagctgcaggtgtgtgctgaattgcaagatggtatttttttttttaaccaagggatgtctcttgtaatactaaccgcgtgataatgggttttcagacatgatgaaaaaaaaaaacttttacaaatgaatacttaccttagaaatattcaccttaggaaaaaagactttgctctgcccttttatattcctttatgctgcaagtggtgacatgttcagatttctaatttggttcattgtggcctatctggtttaagtctttcattaaaaatgtctcgttagagtatttgatgtcatgcaccaaaaaaataaaaccccaccttgttgcaaaagctgacctcgttgcatggaattaaaagagaaggaaaaacacaaggatgaagtctttccgaattcattcttgtgggaactggccttcggagccagccagcactttgggcaaatgcaaacaacaatgagtgcttgagataaaagaaagtgtgacgtcatggtcactggtactcaggcacttcacagtttacttgaaagaggctttggaaaatagataaagtgaaagaagaataaatacatatttttaataatgtaattttaaaaatcctttataatcaggactgagtcttggtttgcagaagctgtcacttaccctgaaacacagtatcaaaagggaaacttaaaacatactgtttgatttttttatttcctcttacaatccatgttttcaggtagaattatgactttccccccattgttacacatttctttacaaaggaggcctgtagaaattggacacgatcatgcttgagcatgtgagttagtcaaattatgagtccctgcctattgtccattacacaccgaatgttaatttaagaaccagaggcagaagttctggcttcctgcttgaaacccaattcttatatgaaattttttaaaagcagaaacctagcagcccatctgctttttctcttttgtcggtgtatttggtacccctccaatgctggtctttttgtagaaactcagtagagaaagtctagctaagcagtgttgaaaagcctgcaagatttcagtttacatatcgacagcatatccactgatttctaaatgggctggtcccatcatctgaagattctgtatagaattattaaaaaaaaaatccatctttctttattttcttcacatgcgacaatttcttaagcactttgacattttggtagttccacactattgagagaataatatatttattttgtgacattgcagatgccaaatactgtaaccttctcatgataacaatacttaggttcaagatcactgttcaaaccctgtcatgctttaaaactgatgcgagatgattttgttttttgcataatcaatacttaagggtgcaatcaactgttagtaattgtgcagtaaagtaaagccctgtggtgtatcaactactagttaagagtctcagttgatttctgtaatgtttgacctaataatagcccgtttcgtctctgacccaacagaggaagcacagatcaaatcaccttggagtggtcaccagggggacagggagccccccaccaatgtatcaatgggtgatttatgatgccttctgccctttggcgagtgaatgggtttcccataggggaagttggcctccctccgtgagctttggaaatgttttctaatagacacagggaggccagttctgtttcagagcaattatcttcccaaattctctgttctggtgttggaactgtgtgccctggtttctgttttcctttctactgctgtaattctctgtctcatcatccttctcttttgtttccatagccttttataatgcatatatgatgctgtgaacagaaataaattatttatacaatcaaaaaaaaaaaaaaaaaa

SEQ ID NO: 61 - protein, 192 aa, Homo sapiens
MGNISSNISAFQSLHIVMLGLDSAGKTTVLYRLKFNEFVNTVPTIGFNTEKIKLSNGTAKGISCHFWDVGGQEKLRPLWKSYSRCTDGIIYVVDSVDVDRLEEAKTELHKVTKFAENQGTPLLVIANKQDLPKSLPVAEIEKQLALHELIPATTYHVQPACAIIGEGLTEGMDKLYEMILKRRKSLKQKKKR

SEQ ID NO: 62 - DNA, 2101 bp, Homo sapiens
  CDS (174)..(1109)
cgcgcgcggcgaatctcaacgctgcgccgtctgcgggcgcttccgggccaccagtttctctgctttccaccctggcgccccccagccctggctccccagctgcgctgccccgggcgtccacgccctgcgggcttagcgggttcagtgggctcaatctgcgcagcgccacctccatgttgaccaagcctctacaggggcctcccgcgccccccgggacccccacgccgccgccaggaggcaaggatcgggaagcgttcgaggccgagtatcgactcggccccctcctgggtaaggggggctttggcaccgtcttcgcaggacaccgcctcacagatcgactccaggtggccatcaaagtgattccccggaatcgtgtgctgggctggtcccccttgtcagactcagtcacatgcccactcgaagtcgcactgctatggaaagtgggtgcaggtggtgggcaccctggcgtgatccgcctgcttgactggtttgagacacaggagggcttcatgctggtcctcgagcggcctttgcccgcccaggatctctttgactatatcacagagaagggcccactgggtgaaggcccaagccgctgcttctttggccaagtagtggcagccatccagcactgccattcccgtggagttgtccatcgtgacatcaaggatgagaacatcctgatagacctacgccgtggctgtgccaaactcattgattttggttctggtgccctgcttcatgatgaaccctacactgactttgatgggacaagggtgtacagccccccagagtggatctctcgacaccagtaccatgcactcccggccactgtctggtcactgggcatcctcctctatgacatggtgtgtggggacattccctttgagagggaccaggagattctggaagctgagctccacttcccagcccatgtctccccagactgctgtgccctaatccgccggtgcctggcccccaaaccttcttcccgaccctcactggaagagatcctgctggacccctggatgcaaacaccagccgaggatgtacccctcaacccctccaaaggaggccctgcccctttggcctggtccttgctaccctaagcctggcctggcctggcctggcccccaatggtcagaagagccatcccatggccatgtcacagggatagatggacatttgttgacttggttttacaggtcattaccagtcattaaagtccagtattactaaggtaagggattgaggatcaggggttagaagacataaaccaagtctgcccagttcccttcccaatcctacaaaggagccttcctcccagaacctgtggtccctgattctggagggggaacttcttgcttctcattttgctaaggaagtttattttggtgaagttgttcccattctgagccccgggactcttattctgatgatgtgtcaccccacattggcacctcctactaccaccacacaaacttagttcatatgctcttacttgggcaagggtgctttccttccaataccccagtagcttttattttagtaaagggaccctttcccctagcctagggtcccatattgggtcaagctgcttacctgcctcagcccaggattctttattctgggggaggtaatgccctgttgttaccccaaggcttcttttttttttttttttgggtgaggggaccctactctgttatcccaagtgctcttattctggtgagaagaaccttacttccataatttgggaaggaatggaagatggacaccaccggacaccaccagacactaggatgggatggatggttttttgggggatgggctaggggaaataaggcttgctgtttgttctcctggggcgctccctccaacttttgcagattcttgcaacctcctcctgagccgggattgtccaattactaaaatgtaaataatcacgtattgtggggaggggagttccaagtgtgccctcctctcttctcctgcctggattatttaaaaagccatgtgtggaaacccactatttaataaaagtaatagaatcagaaaaaaaaaaaaaaaaaaaaaaaaaaaaaaaaaaaaaaaaaaaaaaaaa

SEQ ID NO: 63 - protein, 311 aa, Homo sapiens
MLTKPLQGPPAPPGTPTPPPGGKDREAFEAEYRLGPLLGKGGFGTVFAGHRLTDRLQVAIKVIPRNRVLGWSPLSDSVTCPLEVALLWKVGAGGGHPGVIRLLDWFETQEGFMLVLERPLPAQDLFDYITEKGPLGEGPSRCFFGQVVAAIQHCHSRGVVHRDIKDENILIDLRRGCAKLIDFGSGALLHDEPYTDFDGTRVYSPPEWISRHQYHALPATVWSLGILLYDMVCGDIPFERDQEILEAELHFPAHVSPDCCALIRRCLAPKPSSRPSLEEILLDPWMQTPAEDVPLNPSKGGPAPLAWSLLP

SEQ ID NO: 64 - DNA, 2974 bp, Homo sapiens
  CDS (156)..(2582)
gtgtgcgtgatggagaaaattgggcaccagggctgctcccgagattctcagatctgatttccacgcttgctaccaaaatagtctgggcaggccacttttggaagtaggcgttatctagtgagcaggcggccgctttcgatttcgctttcccctaaatggctgagcttctcgccagcgcaggatcagcctgttcctgggactttccgagagccccgccctcgttccctcccccagccgccagtaggggaggactcggcggtacccggagcttcaggccccaccggggcgcggagagtcccaggcccggccgggaccgggacggcgtccgagtgccaatggctagctctaggtgtcccgctccccgcgggtgccgctgcctccccggagcttctctcgcatggctggggacagtactgctacttctcgccgactgggtgctgctccggaccgcgctgccccgcatattctccctgctggtgcccaccgcgctgccactgctccgggtctgggcggtgggcctgagccgctgggccgtgctctggctgggggcctgcggggtcctcagggcaacggttggctccaagagcgaaaacgcaggtgcccagggctggctggctgctttgaagccattagctgcggcactgggcttggccctgccgggacttgccttgttccgagagctgatctcatggggagcccccgggtccgcggatagcaccaggctactgcactggggaagtcaccctaccgccttcgttgtcagttatgcagcggcactgcccgcagcagccctgtggcacaaactcgggagcctctgggtgcccggcggtcagggcggctctggaaaccctgtgcgtcggcttctaggctgcctgggctcggagacgcgccgcctctcgctgttcctggtcctggtggtcctctcctctcttggggagatggccattccattctttacgggccgcctcactgactggattctacaagatggctcagccgataccttcactcgaaacttaactctcatgtccattctcaccatagccagtgcagtgctggagttcgtgggtgacgggatctataacaacaccatgggccacgtgcacagccacttgcagggagaggtgtttggggctgtcctgcgccaggagacggagtttttccaacagaaccagacaggtaacatcatgtctcgggtaacagaggacacgtccaccctgagtgattctctgagtgagaatctgagcttatttctgtggtacctggtgcgaggcctatgtctcttggggatcatgctctggggatcagtgtccctcaccatggtcaccctgatcaccctgcctctgcttttccttctgcccaagaaggtgggaaaatggtaccagttgctggaagtgcaggtgcgggaatctctggcaaagtccagccaggtggccattgaggctctgtcggccatgcctacagttcgaagctttgccaacgaggagggcgaagcccagaagtttagggaaaagctgcaagaaataaagacactcaaccagaaggaggctgtggcctatgcagtcaactcctggaccactagtatttcaggtatgctgctgaaagtgggaatcctctacattggtgggcagctggtgaccagtggggctgtaagcagtgggaaccttgtcacatttgttctctaccagatgcagttcacccaggctgtggaggtactgctctccatctaccccagagtacagaaggctgtgggctcctcagagaaaatatttgagtacctggaccgcacccctcgctgcccacccagtggtctgttgactcccttacacttggagggccttgtccagttccaagatgtctcctttgcctacccaaaccgcccagatgtcttagtgctacaggggctgacattcaccctacgccctggcgaggtgacggcgctggtgggacccaatgggtctgggaagagcacagtggctgccctgctgcagaatctgtaccagcccaccgggggacagctgctgttggatgggaagccccttccccaatatgagcaccgctacctgcacaggcaggtggctgcagtgggacaagagccacaggtatttggaagaagtcttcaagaaaatattgcctatggcctgacccagaagccaactatggaggaaatcacagctgctgcagtaaagtctggggcccatagtttcatctctggactccctcagggctatgacacagaggtagacgaggctgggagccagctgtcagggggtcagcgacaggcagtggcgttggcccgagcattgatccggaaaccgtgtgtacttatcctggatgatgccaccagtgccctggatgcaaacagccagttacaggtggagcagctcctgtacgaaagccctgagcggtactcccgctcagtgcttctcatcacccagcacctcagcctggtggagcaggctgaccacatcctctttctggaaggaggcgctatccgggaggggggaacccaccagcagctcatggagaaaaaggggtgctactgggccatggtgcaggctcctgcagatgctccagaatgaaagccttctcagacctgcgcactccatctccctcccttttcttctctctgtggtggagaaccacagctgcagagtaggcagctgcctccaggatgagttacttgaaatttgccttgagtgtgttacctcctttccaagctcctcgtgataatgcagacttcctggagtacaaacacaggatttgtaattccttactgtaacggagtttagagccagggctgatgctttggtgtggccagcactctgaaactgagaaatgttcagaatgtacggaaagatgatcagctattttcaacataactgaaggcatatgctggcccataaacaccctgtaggttcttgatatttataataaaattggtgttttgtaaaaaaaaaaaaaaaaaaaaaaa

SEQ ID NO: 65 - protein, 808 aa, Homo sapiens
MAELLASAGSACSWDFPRAPPSFPPPAASRGGLGGTRSFRPHRGAESPRPGRDRDGVRVPMASSRCPAPRGCRCLPGASLAWLGTVLLLLADWVLLRTALPRIFSLLVPTALPLLRVWAVGLSRWAVLWLGACGVLRATVGSKSENAGAQGWLAALKPLAAALGLALPGLALFRELISWGAPGSADSTRLLHWGSHPTAFVVSYAAALPAAALWHKLGSLWVPGGQGGSGNPVRRLLGCLGSETRRLSLFLVLVVLSSLGEMAIPFFTGRLTDWILQDGSADTFTRNLTLMSILTIASAVLEFVGDGIYNNTMGHVHSHLQGEVFGAVLRQETEFFQQNQTGNIMSRVTEDTSTLSDSLSENLSLFLWYLVRGLCLLGIMLWGSVSLTMVTLITLPLLFLLPKKVGKWYQLLEVQVRESLAKSSQVAIEALSAMPTVRSFANEEGEAQKFREKLQEIKTLNQKEAVAYAVNSWTTSISGMLLKVGILYIGGQLVTSGAVSSGNLVTFVLYQMQFTQAVEVLLSIYPRVQKAVGSSEKIFEYLDRTPRCPPSGLLTPLHLEGLVQFQDVSFAYPNRPDVLVLQGLTFTLRPGEVTALVGPNGSGKSTVAALLQNLYQPTGGQLLLDGKPLPQYEHRYLHRQVAAVGQEPQVFGRSLQENIAYGLTQKPTMEEITAAAVKSGAHSFISGLPQGYDTEVDEAGSQLSGGQRQAVALARALIRKPCVLILDDATSALDANSQLQVEQLLYESPERYSRSVLLITQHLSLVEQADHILFLEGGAIREGGTHQQLMEKKGCYWAMVQAPADAPE

SEQ ID NO: 66 - DNA, 1263 bp, Homo sapiens
  CDS (122)..(967)
ttcctttctctctcagctctccgtctctctttctctctcagcctctttctttctccctgtctcccccactgtcagcacctcttctgtgtggtgagtggaccgcttaccccactaggtgaagatgtcagcccaggagagctgcctcagcctcatcaagtacttcctcttcgttttcaacctcttcttcttcgtcctcggcagcctgatcttctgcttcggcatctggatcctcattgacaagaccagcttcgtgtcctttgtgggcttggccttcgtgcctctgcagatctggtccaaagtcctggccatctcaggaatcttcaccatgggcatcgccctcctgggttgtgtgggggccctcaaggagctccgctgcctcctgggcctgtattttgggatgctgctgctcctgtttgccacacagatcaccctgggaatcctcatctccactcagcgggcccagctggagcgaagcttgcgggacgtcgtagagaaaaccatccaaaagtacggcaccaaccccgaggagaccgcggccgaggagagctgggactatgtgcagttccagctgcgctgctgcggctggcactacccgcaggactggttccaagtcctcatcctgagaggtaacgggtcggaggcgcaccgcgtgccctgctcctgctacaacttgtcggcgaccaacgactccacaatcctagataaggtgatcttgccccagctcagcaggcttggacacctggcgcggtccagacacagtgcagacatctgcgctgtccctgcagagagccacatctaccgcgagggctgcgcgcagggcctccagaagtggctgcacaacaaccttatttccatagtgggcatttgcctgggcgtcggcctactcgagctcgggttcatgacgctctcgatattcctgtgcagaaacctggaccacgtctacaaccggctcgctcgataccgttaggccccgccctccccaaagtcccgccccgcccccgtcacgtgcgctgggcacttccctgctgcctgtaaatatttgtttaatccccagttcgcctggagccctccgccttcacattcccctggggacccacgtggctgcgtgcccctgctgctgtcacctctcccacgggacctggggctttcgtccacagcttcctgtccccatctgtcggcctaccaccacccacaagattatttttcacccaaacctcaaataaatcccctgcgtttttggtaaaaaaaaaaaaaaaaaaaaaa

SEQ ID NO: 67 - protein, 281 aa, Homo sapiens
MSAQESCLSLIKYFLFVFNLFFFVLGSLIFCFGIWILIDKTSFVSFVGLAFVPLQIWSKVLAISGIFTMGIALLGCVGALKELRCLLGLYFGMLLLLFATQITLGILISTQRAQLERSLRDVVEKTIQKYGTNPEETAAEESWDYVQFQLRCCGWHYPQDWFQVLILRGNGSEAHRVPCSCYNLSATNDSTILDKVILPQLSRLGHLARSRHSADICAVPAESHIYREGCAQGLQKWLHNNLISIVGICLGVGLLELGFMTLSIFLCRNLDHVYNRLARYR

SEQ ID NO: 68 - DNA, 1229 bp, Homo sapiens
  CDS (292)..(933)
ttcctttctctctcagctctccgtctctctttctctctcagcctctttctttctccctgtctcccccactgtcagcacctcttctgtgtggtgagtggaccgcttaccccactaggtgaagatgtcagcccaggagagctgcctcagcctcatcaagtcctcggcagcctgatcttctgcttcggcatctggatcctcattgacaagaccagcttcgtgtcctttgtgggcttggccttcgtgcctctgcagatctggtccaaagtcctggccatctcaggaatcttcaccatgggcatcgccctcctgggttgtgtgggggccctcaaggagctccgctgcctcctgggcctgtattttgggatgctgctgctcctgtttgccacacagatcaccctgggaatcctcatctccactcagcgggcccagctggagcgaagcttgcgggacgtcgtagagaaaaccatccaaaagtacggcaccaaccccgaggagaccgcggccgaggagagctgggactatgtgcagttccagctgcgctgctgcggctggcactacccgcaggactggttccaagtcctcatcctgagaggtaacgggtcggaggcgcaccgcgtgccctgctcctgctacaacttgtcggcgaccaacgactccacaatcctagataaggtgatcttgccccagctcagcaggcttggacacctggcgcggtccagacacagtgcagacatctgcgctgtccctgcagagagccacatctaccgcgagggctgcgcgcagggcctccagaagtggctgcacaacaaccttatttccatagtgggcatttgcctgggcgtcggcctactcgagctcgggttcatgacgctctcgatattcctgtgcagaaacctggaccacgtctacaaccggctcgctcgataccgttaggccccgccctccccaaagtcccgccccgcccccgtcacgtgcgctgggcacttccctgctgcctgtaaatatttgtttaatccccagttcgcctggagccctccgccttcacattcccctggggacccacgtggctgcgtgcccctgctgctgtcacctctcccacgggacctggggctttcgtccacagcttcctgtccccatctgtcggcctaccaccacccacaagattatttttcacccaaacctcaaataaatcccctgcgtttttggtaaaaaaaaaaaaaaaaaaaaaa

SEQ ID NO: 69 - protein, 213 aa, Homo sapiens
MGIALLGCVGALKELRCLLGLYFGMLLLLFATQITLGILISTQRAQLERSLRDVVEKTIQKYGTNPEETAAEESWDYVQFQLRCCGWHYPQDWFQVLILRGNGSEAHRVPCSCYNLSATNDSTILDKVILPQLSRLGHLARSRHSADICAVPAESHIYREGCAQGLQKWLHNNLISIVGICLGVGLLELGFMTLSIFLCRNLDHVYNRLARYR

SEQ ID NO: 70 - DNA, 4928 bp, Homo sapiens
  CDS (107)..(2398)
agctgggttgctgcaaaaaggggcggggagaaggcgggggcgctgcatgcagcgcgctggctccagcggtggccgcggggaatgtgacatcagcggcgccgggcgcttggggctggaggaggcagctcgcctcagctgcgctgtgcacacctcgcccgggggaggacgcagacccgggcaggcggcagggatgtcggcgaaggagaggccaaagggcaaagtgatcaaggacagcgtcaccctcctgccctgcttttatttcgtcgagttgcctatattggcatcatcggtggttagcctctatttcctcgaactcacagatgtcttcaaacctgtgcactctggatttagctgctatgaccggagtcttagcatgccgtacattgaaccaacccaggaggcaattccattcctcatgttgcttagcttggcttttgctggacctgcaattacgattatggtaggagaaggaattctctactgttgcctctccaaaagaagaaatggggtcggactagagcccaacattaatgctggaggctgcaacttcaattccttcctcagacgagctgtcagattcgttggtgttcatgtatttggattatgctctacagctctcattacagatatcatacagctgtccacaggatatcaagcaccttactttctgactgtgtgcaaaccaaactatacctctctgaatgtatcttgcaaagaaaattcctacattgtggaagatatttgctcaggatctgacctcacagttatcaacagtggcagaaagtccttcccttctcaacatgcaacccttgctgcctttgcagctgtgtatgtttcgatgtacttcaattccacattaacggattcctctaagcttctgaaacctctcttggtcttcacatttatcatctgtggaataatctgcgggctaacacggataactcagtataagaaccacccagttgatgtctattgtggctttttaataggaggaggaattgcactgtacttgggcttgtatgctgtggggaatttcctgcccagtgatgagagtatgtttcagcacagagacgccctcaggtctctgacagacctcaatcaagatcccaaccgacttttatctgctaaaaatggtagcagcagtgatggaattgctcatacagaaggcatcctcaaccgaaaccacagagatgctagctctctgacaaatctcaaaagagcaaatgctgatgtggaaatcattactccacggagccccatggggaaggagaacatggttaccttcagcaataccttgccgcgagccaataccccatctgtagaagaccctgtcagaagaaatgcgagcattcatgcctctatggattccgctcgatcaaagcagctcctcacccagtggaagaataagaatgaaagtcgaaagttgtccttgcaagttatagagcctgagcctgggcagtcaccacccagatccatagaaatgaggtcaagctcagagccatcgagggtaggggtgaatggagaccaccatggtcctggcaatcagtacctcaaaatccagcctggcgctgtccccggatgtaacaacagcatgcctggagggccaagagtgtccattcagtcccgtcctgggtcctcacagttggtgcacatccctgaggagactcaggaaaacataagcacctcccccaaaagcagctctgctcgggccaagtggttaaaagctgctgaaaagactgtggcctgtaacagaagcaacagccagccccgaatcatgcaagtcatagccatgtccaagcagcagggtgtcctccaaagcagccccaagaacactgaaggcagcacggtctcctgcactggctccatccgctataaaaccttgacagaccatgagcccagtgggatagtgagggttgaggctcacccagagaacaacaggcccatcatacagatcccgtccactgaaggtgaaggcagtggctcctggaagtggaaagcccctgaaaagggcagccttcgccaaacttacgagctcaacgatctcaacagggactcagaaagctgtgagtctctgaaagacagctttggttctggagatcgcaagagaagcaacattgatagcaatgagcatcaccaccacggaattaccaccatccgcgtcaccccagtagagggcagcgaaattggctcagagacgctgtccatttcttcttcccgcgactccaccctgcggagaaagggcaatatcattctaatccctgaaagaagcaacagccccgaaaacactagaaatatcttctacaaaggaacctcccccacacgggcttataaggattgagtgatgtccattccatcattagggctactcgcaaaagaccatatgttgattctacctgtgttctgttccagcgaattgggaagtctcaccaagctagattgtctaccatcagcccagaactctgtaacttttcagaactgctatactcaaacttgcagatctcacatcaaggagagggaaaagcacaatgcaagaacctaactaacgtgatgatatgaagagttttcttaagacctgtcgtcaaacttaaaaggttttgcagagggcagtatcaaaagaaagtggttttcttcaaatgtatactattttacttcctgaatgtgccaactttggggatttttctttatagtgagctgtgggaacccagaacacacacgttttccctacagcagaggccatgcagtattatatattcattttgcagaatctgcacctacagctcaatacgggtggtgctgattattatagtacatataccatgtaaactctcaaactctatttagctgtgaaatagtggtgtgcaattccttgttaaagaaatgctactttattaagaagatgctggctgctttgtgttagaataggacaccccgcagcttctctgtagtggctctgtcacagtcaaaaaatgaaaaggtttttgtgcgtttcttcaaaattctgctttcttcaacatcaaaaattgtgtagaaatattttcagtgaaagggaataactagtacttttctgcatagtttttcttctgcttactttttatttaagtataggtactgctaatgaatctgttttcttagtgagtaaatttgcataattttataaatattattttagagaatcttttgaaattgttgtgatcatattttgctttctatggcttctccttaacttattgattaattttttgaagttatagatatgttctcctattttaaaagcaaaaataacaattgacattccttgagcaaaatatactgctgtgaatttgcaaacaagaaatctgagccaaaacttgacattgtgggttacattgccagaaatgttggtcaagtttgcccttagatgtctacaactagctggcataggttgccatcttaacaagtaatctaaaagtcccattcggttctacattattaactttttttttctatatcctgatgaccagtaaattagagccacactggttaagtttgactcgtctctaaaacgtttttgttaattggacaccaagaggaagaatctgaaaaaaaaatgcatgttggtaagtaaaagtatctcacggtacaaattaagaatgactttcttcaaaatatctgaataggtgcagttttagtttaacatgcaaacaaccattgttgctacctatcctgaatcaagccttgagcctaaatcaaagcaaaccaataccattgataagaagaagataaaaacaaaatattttggagtgttttccaacttaaagtatgaagacatactcagttcttggaacttagtattaaaccttttttatgccatttcataagaattccgatatatacttgatgattgccaaggggatgaaaggaaacaacagagatggttgatctgatcttagctcactttccaataacagaaggagttgtttacagatgaatagtatcacatcattatcaatttccacatgaaaaaggtggagctttctagaaaaaccaacctctaaggcattaggaatttagctgaaaccagcagaattgaaaactctggcaataaaacatggactcaaccatatcccttctggcaatttccttctcagagaggggagtgggaataaaatgttgccttccccacttctcaccaccaccgccatcatgacgctcatactggcttttgcctgtttgtagaggaaaaggtgggctggttttagtactctgaaggacaaaaacaagcaaacaaaaacccctgctgcagcatttcaggtgcagtatgatatttcctaatctttcctatttcttaacaaaagattttaaagtacttctctagtcattgaagtttttttttctttacataaatattgatatattctttttctactcaaagtgccaaaggctacagtttttaatgacttaacaaattgtaccacattgttaaggacatataatgatagacactagaactcagacctctgcatgtatatttgataacatgtcttttgtaaaacaaaaattacaaaaaaatttgtttacattccactggtaccttaatttaaaataaatcagactaaaaggtggtatctcttcttagtgttctatttatcttatttgctaatgggagcacttcttcctttgttaggctgtgctttactgataaaaccaagtattgaataaagagagttaattatctttttaaagtaaataaaattatgaaaatatatatagtatatataaagtactgtgtttaaaaaaatgttatgcaatgttttccaaactgataaagtttgtaaagtgctataaatgtattttgttaagtacagataaaagctattgtgtgagtatattgtgctaaaatcatagaaataaagattagatttcttcatcaaaaaaaaaaaaaaaaaaaa

SEQ ID NO: 71 - protein, 743 aa, Homo sapiens
LGLEEAARLSCAVHTSPGGGRRPGQAAGMSAKERPKGKVIKDSVTLLPCFYFVELPILASSVVSLYFLELTDVFKPVHSGFSCYDRSLSMPYIEPTQEAIPFLMLLSLAFAGPAITIMVGEGILYCCLSKRRNGVGLEPNINAGGCNFNSFLRRAVRFVGVHVFGLCSTALITDIIQLSTGYQAPYFLTVCKPNYTSLNVSCKENSYIVEDICSGSDLTVINSGRKSFPSQHATLAAFAAVYVSMYFNSTLTDSSKLLKPLLVFTFIICGIICGLTRITQYKNHPVDVYCGFLIGGGIALYLGLYAVGNFLPSDESMFQHRDALRSLTDLNQDPNRLLSAKNGSSSDGIAHTEGILNRNHRDASSLTNLKRANADVEIITPRSPMGKENMVTFSNTLPRANTPSVEDPVRRNASIHASMDSARSKQLLTQWKNKNESRKLSLQVIEPEPGQSPPRSIEMRSSSEPSRVGVNGDHHGPGNQYLKIQPGAVPGCNNSMPGGPRVSIQSRPGSSQLVHIPEETQENISTSPKSSSARAKWLKAAEKTVACNRSNSQPRIMQVIAMSKQQGVLQSSPKNTEGSTVSCTGSIRYKTLTDHEPSGIVRVEAHPENNRPIIQIPSTEGEGSGSWKWKAPEKGSLRQTYELNDLNRDSESCESLKDSFGSGDRKRSNIDSNEHHHHGITTIRVTPVEGSEIGSETLSISSSRDSTLRRKGNIILIPERSNSPENTRNIFYKGTSPTRAYKD

SEQ ID NO: 72 - DNA, 1712 bp, Homo sapiens
  CDS (93)..(1637)
cgaaatcggctggtttatattggcgcggcccagacggcagaggtctctgcggcgcggtcctcggagacacgcggcggtgtcctgtgttggccatggccgactacctgattagtgggggcacgtcctacgtgccagacgacggactcacagcacagcagctcttcaactgcggagacggcctcacctacaatgactttctcattctccctgggtacatcgacttcactgcagaccaggtggacctgacttctgctctgaccaagaaaatcactcttaagaccccactggtttcctctcccatggacacagtcacagaggctgggatggccatagcaatggcgcttacaggcggtattggcttcatccaccacaactgtacacctgaattccaggccaatgaagttcggaaagtgaagaaatatgaacagggattcatcacagaccctgtggtcctcagccccaaggatcgcgtgcgggatgtttttgaggccaaggcccggcatggtttctgcggtatcccaatcacagacacaggccggatggggagccgcttggtgggcatcatctcctccagggacattgattttctcaaagaggaggaacatgactgtttcttggaagagataatgacaaagagggaagacttggtggtagcccctgcaggcatcacactgaaggaggcaaatgaaattctgcagcgcagcaagaagggaaagttgcccattgtaaatgaagatgatgagcttgtggccatcattgcccggacagacctgaagaagaatcgggactacccactagcctccaaagatgccaagaaacagctgctgtgtggggcagccattggcactcatgaggatgacaagtataggctggacttgctcgcccaggctggtgtggatgtagtggttttggactcttcccagggaaattccatcttccagatcaatatgatcaagtacatcaaagacaaataccctaatctccaagtcattggaggcaatgtggtcactgctgcccaggccaagaacctcattgatgcaggtgtggatgccctgcgggtgggcatgggaagtggctccatctgcattacgcaggaagtgctggcctgtgggcggccccaagcaacagcagtgtacaaggtgtcagagtatgcacggcgctttggtgttccggtcattgctgatggaggaatccaaaatgtgggtcatattgcgaaagccttggcccttggggcctccacagtcatgatgggctctctcctggctgccaccactgaggcccctggtgaatacttcttttccgatgggatccggctaaagaaatatcgcggtatgggttctctcgatgccatggacaagcacctcagcagccagaacagatatttcagtgaagctgacaaaatcaaagtggcccagggagtgtctggtgctgtgcaggacaaagggtcaatccacaaatttgtcccttacctgattgctggcatccaacactcatgccaggacattggtgccaagagcttgacccaagtccgagccatgatgtactctggggagcttaagtttgagaagagaacgtcctcagcccaggtggaaggtggcgtccatagcctccattcgtatgagaagcggcttttctgaaaagggatccagcacacctcctcggtttttttttcaataaaagtttagaaagaaaaaaaaaaaaaaaaaaaaaaa

SEQ ID NO: 73 - protein, 514 aa, Homo sapiens
MADYLISGGTSYVPDDGLTAQQLFNCGDGLTYNDFLILPGYIDFTADQVDLTSALTKKITLKTPLVSSPMDTVTEAGMAIAMALTGGIGFIHHNCTPEFQANEVRKVKKYEQGFITDPVVLSPKDRVRDVFEAKARHGFCGIPITDTGRMGSRLVGIISSRDIDFLKEEEHDCFLEEIMTKREDLVVAPAGITLKEANEILQRSKKGKLPIVNEDDELVAIIARTDLKKNRDYPLASKDAKKQLLCGAAIGTHEDDKYRLDLLAQAGVDVVVLDSSQGNSIFQINMIKYIKDKYPNLQVIGGNVVTAAQAKNLIDAGVDALRVGMGSGSICITQEVLACGRPQATAVYKVSEYARRFGVPVIADGGIQNVGHIAKALALGASTVMMGSLLAATTEAPGEYFFSDGIRLKKYRGMGSLDAMDKHLSSQNRYFSEADKIKVAQGVSGAVQDKGSIHKFVPYLIAGIQHSCQDIGAKSLTQVRAMMYSGELKFEKRTSSAQVEGGVHSLHSYEKRLF

SEQ ID NO: 74 - DNA, 4714 bp, Homo sapiens
  CDS (383)..(2161)
ggagagggagaaggctctcgggcggagagaggtcctgcccagctgttggcgaggagtttcctgtttcccccgcagcgctgagttgaagttgagtgagtcactcgcgcgcacggagcgacgacacccccgcgcgtgcacccgctcgggacaggagccggactcctgtgcagcttccctcggccgccgggggcctccccgcgcctcgccggcctccaggccccctcctggctggcgagcgggcgccacatctggcccgcacatctgcgctgccggcccggcgcggggtccggagagggcgcggcgcggaggcgcagccaggggtccgggaaggcgccgtccgctgcgctgggggctcggtctatgacgagcagcggggtctgccatgggtcgggggctgctcaggggcctgtggccgctgcacatcgtcctgtggacgcgtatcgccagcacgatcccaccgcacgttcagaagtcggatgtggaaatggaggcccagaaagatgaaatcatctgccccagctgtaataggactgcccatccactgagacatattaataacgacatgatagtcactgacaacaacggtgcagtcaagtttccacaactgtgtaaattttgtgatgtgagattttccacctgtgacaaccagaaatcctgcatgagcaactgcagcatcacctccatctgtgagaagccacaggaagtctgtgtggctgtatggagaaagaatgacgagaacataacactagagacagtttgccatgaccccaagctcccctaccatgactttattctggaagatgctgcttctccaaagtgcattatgaaggaaaaaaaaaagcctggtgagactttcttcatgtgttcctgtagctctgatgagtgcaatgacaacatcatcttctcagaagaatataacaccagcaatcctgacttgttgctagtcatatttcaagtgacaggcatcagcctcctgccaccactgggagttgccatatctgtcatcatcatcttctactgctaccgcgttaaccggcagcagaagctgagttcaacctgggaaaccggcaagacgcggaagctcatggagttcagcgagcactgtgccatcatcctggaagatgaccgctctgacatcagctccacgtgtgccaacaacatcaaccacaacacagagctgctgcccattgagctggacaccctggtggggaaaggtcgctttgctgaggtctataaggccaagctgaagcagaacacttcagagcagtttgagacagtggcagtcaagatctttccctatgaggagtatgcctcttggaagacagagaaggacatcttctcagacatcaatctgaagcatgagaacatactccagttcctgacggctgaggagcggaagacggagttggggaaacaatactggctgatcaccgccttccacgccaagggcaacctacaggagtacctgacgcggcatgtcatcagctgggaggacctgcgcaagctgggcagctccctcgcccgggggattgctcacctccacagtgatcacactccatgtgggaggcccaagatgcccatcgtgcacagggacctcaagagctccaatatcctcgtgaagaacgacctaacctgctgcctgtgtgactttgggctttccctgcgtctggaccctactctgtctgtggatgacctggctaacagtgggcaggtgggaactgcaagatacatggctccagaagtcctagaatccaggatgaatttggagaatgttgagtccttcaagcagaccgatgtctactccatggctctggtgctctgggaaatgacatctcgctgtaatgcagtgggagaagtaaaagattatgagcctccatttggttccaaggtgcgggagcacccctgtgtcgaaagcatgaaggacaacgtgttgagagatcgagggcgaccagaaattcccagcttctggctcaaccaccagggcatccagatggtgtgtgagacgttgactgagtgctgggaccacgacccagaggcccgtctcacagcccagtgtgtggcagaacgcttcagtgagctggagcatctggacaggctctcggggaggagctgctcggaggagaagattcctgaagacggctccctaaacactaccaaatagctcttctggggcaggctgggccatgtccaaagaggctgcccctctcaccaaagaacagaggcagcaggaagctgcccctgaactgatgcttcctggaaaaccaagggggtcactcccctccctgtaagctgtggggataagcagaaacaacagcagcagggagtgggtgacatagagcattctatgcctttgacattgtcataggataagctgtgttagcacttcctcaggaaatgagattgatttttacaatagccaataacatttgcactttattaatgcctgtatataaatatgaatagctatgttttatatatatatatatatatctatatatgtctatagctctatatatatagccataccttgaaaagagacaaggaaaaacatcaaatattcccaggaaattggttttattggagaactccagaaccaagcagagaaggaagggacccatgacagcattagcatttgacaatcacacatgcagtggttctctgactgtaaaacagtgaactttgcatgaggaaagaggctccatgtctcacagccagctatgaccacattgcacttgcttttgcaaaataatcattccctgcctagcacttctcttctggccatggaactaagtacagtggcactgtttgaggaccagtgttcccggggttcctgtgtgcccttatttctcctggacttttcatttaagctccaagccccaaatctggggggctagtttagaaactctccctcaacctagtttagaaactctaccccatctttaataccttgaatgttttgaaccccactttttaccttcatgggttgcagaaaaatcagaacagatgtccccatccatgcgattgccccaccatctactaatgaaaaattgttctttttttcatctttcccctgcacttatgttactattctctgctcccagccttcatccttttctaaaaaggagcaaattctcactctaggctttatcgtgtttactttttcattacacttgacttgattttctagttttctatacaaacaccaatgggttccatctttctgggctcctgattgctcaagcacagtttggcctgatgaagaggatttcaactacacaatactatcattgtcaggactatgacctcaggcactctaaacatatgttttgtttggtcagcacagcgtttcaaaaagtgaagccactttataaatatttggagattttgcaggaaaatctggatccccaggtaaggatagcagatggttttcagttatctccagtccacgttcacaaaatgtgaaggtgtggagacacttacaaagctgcctcacttctcactgtaaacattagctctttccactgcctacctggaccccagtctaggaattaaatctgcacctaaccaaggtcccttgtaagaaatgtccattcaagcagtcattctctgggtatataatatgattttgactaccttatctggtgttaagatttgaagttggccttttattggactaaaggggaactcctttaagggtctcagttagcccaagtttcttttgcttatatgttaatagttttaccctctgcattggagagaggagtgctttactccaagaagctttcctcatggttaccgttctctccatcatgccagccttctcaacctttgcagaaattactagagaggatttgaatgtgggacacaaaggtcccatttgcagttagaaaatttgtgtccacaaggacaagaacaaagtatgagctttaaaactccataggaaacttgttaatcaacaaagaagtgttaatgctgcaagtaatctcttttttaaaactttttgaagctacttattttcagccaaataggaatattagagagggactggtagtgagaatatcagctctgtttggatggtggaaggtctcattttattgagatttttaagatacatgcaaaggtttggaaatagaacctctaggcaccctcctcagtgtgggtgggctgagagttaaagacagtgtggctgcagtagcatagaggcgcctagaaattccacttgcaccgtagggcatgctgataccatcccaatagctgttgcccattgacctctagtggtgagtttctagaatactggtccattcatgagatattcaagattcaagagtattctcacttctgggttatcagcataaactggaatgtagtgtcagaggatactgtggcttgttttgtttatgtttttttttcttattcaagaaaaaagaccaaggaataacattctgtagttcctaaaaatactgacttttttcactactatacataaagggaaagttttattcttttatggaacacttcagctgtactcatgtattaaaataggaatgtgaatgctatatactctttttatatcaaaagtctcaagcacttatttttattctatgcattgtttgtcttttacataaataaaatgtttattagattgaataaagcaaaatactcaggtgagcatcctgcctcctgttcccattcctagtagctaaaaaaaaaaaaa

SEQ ID NO: 75 - protein, 592 aa, Homo sapiens
MGRGLLRGLWPLHIVLWTRIASTIPPHVQKSDVEMEAQKDEIICPSCNRTAHPLRHINNDMIVTDNNGAVKFPQLCKFCDVRFSTCDNQKSCMSNCSITSICEKPQEVCVAVWRKNDENITLETVCHDPKLPYHDFILEDAASPKCIMKEKKKPGETFFMCSCSSDECNDNIIFSEEYNTSNPDLLLVIFQVTGISLLPPLGVAISVIIIFYCYRVNRQQKLSSTWETGKTRKLMEFSEHCAIILEDDRSDISSTCANNINHNTELLPIELDTLVGKGRFAEVYKAKLKQNTSEQFETVAVKIFPYEEYASWKTEKDIFSDINLKHENILQFLTAEERKTELGKQYWLITAFHAKGNLQEYLTRHVISWEDLRKLGSSLARGIAHLHSDHTPCGRPKMPIVHRDLKSSNILVKNDLTCCLCDFGLSLRLDPTLSVDDLANSGQVGTARYMAPEVLESRMNLENVESFKQTDVYSMALVLWEMTSRCNAVGEVKDYEPPFGSKVREHPCVESMKDNVLRDRGRPEIPSFWLNHQGIQMVCETLTECWDHDPEARLTAQCVAERFSELEHLDRLSGRSCSEEKIPEDGSLNTTK

SEQ ID NO: 76 - DNA, 4639 bp, Homo sapiens
  CDS (383)..(2086)
ggagagggagaaggctctcgggcggagagaggtcctgcccagctgttggcgaggagtttcctgtttcccccgcagcgctgagttgaagttgagtgagtcactcgcgcgcacggagcgacgacacccccgcgcgtgcacccgctcgggacaggagccggactcctgtgcagcttccctcggccgccgggggcctccccgcgcctcgccggcctccaggccccctcctggctggcgagcgggcgccacatctggcccgcacatctgcgctgccggcccggcgcggggtccggagagggcgcggcgcggaggcgcagccaggggtccgggaaggcgccgtccgctgcgctgggggctcggtctatgacgagcagcggggtctgccatgggtcgggggctgctcaggggcctgtggccgctgcacatcgtcctgtggacgcgtatcgccagcacgatcccaccgcacgttcagaagtcggttaataacgacatgatagtcactgacaacaacggtgcagtcaagtttccacaactgtgtaaattttgtgatgtgagattttccacctgtgacaaccagaaatcctgcatgagcaactgcagcatcacctccatctgtgagaagccacaggaagtctgtgtggctgtatggagaaagaatgacgagaacataacactagagacagtttgccatgaccccaagctcccctaccatgactttattctggaagatgctgcttctccaaagtgcattatgaaggaaaaaaaaaagcctggtgagactttcttcatgtgttcctgtagctctgatgagtgcaatgacaacatcatcttctcagaagaatataacaccagcaatcctgacttgttgctagtcatatttcaagtgacaggcatcagcctcctgccaccactgggagttgccatatctgtcatcatcatcttctactgctaccgcgttaaccggcagcagaagctgagttcaacctgggaaaccggcaagacgcggaagctcatggagttcagcgagcactgtgccatcatcctggaagatgaccgctctgacatcagctccacgtgtgccaacaacatcaaccacaacacagagctgctgcccattgagctggacaccctggtggggaaaggtcgctttgctgaggtctataaggccaagctgaagcagaacacttcagagcagtttgagacagtggcagtcaagatctttccctatgaggagtatgcctcttggaagacagagaaggacatcttctcagacatcaatctgaagcatgagaacatactccagttcctgacggctgaggagcggaagacggagttggggaaacaatactggctgatcaccgccttccacgccaagggcaacctacaggagtacctgacgcggcatgtcatcagctgggaggacctgcgcaagctgggcagctccctcgcccgggggattgctcacctccacagtgatcacactccatgtgggaggcccaagatgcccatcgtgcacagggacctcaagagctccaatatcctcgtgaagaacgacctaacctgctgcctgtgtgactttgggctttccctgcgtctggaccctactctgtctgtggatgacctggctaacagtgggcaggtgggaactgcaagatacatggctccagaagtcctagaatccaggatgaatttggagaatgttgagtccttcaagcagaccgatgtctactccatggctctggtgctctgggaaatgacatctcgctgtaatgcagtgggagaagtaaaagattatgagcctccatttggttccaaggtgcgggagcacccctgtgtcgaaagcatgaaggacaacgtgttgagagatcgagggcgaccagaaattcccagcttctggctcaaccaccagggcatccagatggtgtgtgagacgttgactgagtgctgggaccacgacccagaggcccgtctcacagcccagtgtgtggcagaacgcttcagtgagctggagcatctggacaggctctcggggaggagctgctcggaggagaagattcctgaagacggctccctaaacactaccaaatagctcttctggggcaggctgggccatgtccaaagaggctgcccctctcaccaaagaacagaggcagcaggaagctgcccctgaactgatgcttcctggaaaaccaagggggtcactcccctccctgtaagctgtggggataagcagaaacaacagcagcagggagtgggtgacatagagcattctatgcctttgacattgtcataggataagctgtgttagcacttcctcaggaaatgagattgatttttacaatagccaataacatttgcactttattaatgcctgtatataaatatgaatagctatgttttatatatatatatatatatctatatatgtctatagctctatatatatagccataccttgaaaagagacaaggaaaaacatcaaatattcccaggaaattggttttattggagaactccagaaccaagcagagaaggaagggacccatgacagcattagcatttgacaatcacacatgcagtggttctctgactgtaaaacagtgaactttgcatgaggaaagaggctccatgtctcacagccagctatgaccacattgcacttgcttttgcaaaataatcattccctgcctagcacttctcttctggccatggaactaagtacagtggcactgtttgaggaccagtgttcccggggttcctgtgtgcccttatttctcctggacttttcatttaagctccaagccccaaatctggggggctagtttagaaactctccctcaacctagtttagaaactctaccccatctttaataccttgaatgttttgaaccccactttttaccttcatgggttgcagaaaaatcagaacagatgtccccatccatgcgattgccccaccatctactaatgaaaaattgttctttttttcatctttcccctgcacttatgttactattctctgctcccagccttcatccttttctaaaaaggagcaaattctcactctaggctttatcgtgtttactttttcattacacttgacttgattttctagttttctatacaaacaccaatgggttccatctttctgggctcctgattgctcaagcacagtttggcctgatgaagaggatttcaactacacaatactatcattgtcaggactatgacctcaggcactctaaacatatgttttgtttggtcagcacagcgtttcaaaaagtgaagccactttataaatatttggagattttgcaggaaaatctggatccccaggtaaggatagcagatggttttcagttatctccagtccacgttcacaaaatgtgaaggtgtggagacacttacaaagctgcctcacttctcactgtaaacattagctctttccactgcctacctggaccccagtctaggaattaaatctgcacctaaccaaggtcccttgtaagaaatgtccattcaagcagtcattctctgggtatataatatgattttgactaccttatctggtgttaagatttgaagttggccttttattggactaaaggggaactcctttaagggtctcagttagcccaagtttcttttgcttatatgttaatagttttaccctctgcattggagagaggagtgctttactccaagaagctttcctcatggttaccgttctctccatcatgccagccttctcaacctttgcagaaattactagagaggatttgaatgtgggacacaaaggtcccatttgcagttagaaaatttgtgtccacaaggacaagaacaaagtatgagctttaaaactccataggaaacttgttaatcaacaaagaagtgttaatgctgcaagtaatctcttttttaaaactttttgaagctacttattttcagccaaataggaatattagagagggactggtagtgagaatatcagctctgtttggatggtggaaggtctcattttattgagatttttaagatacatgcaaaggtttggaaatagaacctctaggcaccctcctcagtgtgggtgggctgagagttaaagacagtgtggctgcagtagcatagaggcgcctagaaattccacttgcaccgtagggcatgctgataccatcccaatagctgttgcccattgacctctagtggtgagtttctagaatactggtccattcatgagatattcaagattcaagagtattctcacttctgggttatcagcataaactggaatgtagtgtcagaggatactgtggcttgttttgtttatgtttttttttcttattcaagaaaaaagaccaaggaataacattctgtagttcctaaaaatactgacttttttcactactatacataaagggaaagttttattcttttatggaacacttcagctgtactcatgtattaaaataggaatgtgaatgctatatactctttttatatcaaaagtctcaagcacttatttttattctatgcattgtttgtcttttacataaataaaatgtttattagattgaataaagcaaaatactcaggtgagcatcctgcctcctgttcccattcctagtagctaaaaaaaaaaaaa

SEQ ID NO: 77 - protein, 567 aa, Homo sapiens
MGRGLLRGLWPLHIVLWTRIASTIPPHVQKSVNNDMIVTDNNGAVKFPQLCKFCDVRFSTCDNQKSCMSNCSITSICEKPQEVCVAVWRKNDENITLETVCHDPKLPYHDFILEDAASPKCIMKEKKKPGETFFMCSCSSDECNDNIIFSEEYNTSNPDLLLVIFQVTGISLLPPLGVAISVIIIFYCYRVNRQQKLSSTWETGKTRKLMEFSEHCAIILEDDRSDISSTCANNINHNTELLPIELDTLVGKGRFAEVYKAKLKQNTSEQFETVAVKIFPYEEYASWKTEKDIFSDINLKHENILQFLTAEERKTELGKQYWLITAFHAKGNLQEYLTRHVISWEDLRKLGSSLARGIAHLHSDHTPCGRPKMPIVHRDLKSSNILVKNDLTCCLCDFGLSLRLDPTLSVDDLANSGQVGTARYMAPEVLESRMNLENVESFKQTDVYSMALVLWEMTSRCNAVGEVKDYEPPFGSKVREHPCVESMKDNVLRDRGRPEIPSFWLNHQGIQMVCETLTECWDHDPEARLTAQCVAERFSELEHLDRLSGRSCSEEKIPEDGSLNTTK

SEQ ID NO: 78 - DNA, 2625 bp, Homo sapiens
  CDS (600)..(2180)
atagggtccacagccttgtgttcttcaaatactgtaaagcagccctctccagattccttgagggtcactttatattacacattcgtccacacaggacaacaaagtcaccacttccacccgccaaagcgcgctcaggtcggccgccacttcccttggtacacgcggaacgcaagccgcgccgaggctaaaggaagaggccggaatgcagggcgaaggggcgcagagatgctagccaatgctgccacctctattttggatataagggatcttgtaaagctccgttattcgtgtggctatcacaaacaaggtggtttcgaccggccttggctagagaaggcctcctcagcctctgaggatcccaaggtctgtcgcagcacccaacactcccctcgcaggcccagatgccgagggcggaggcgcggcctggagggactagttggcgcgcggctgcccggcgtggtgacgtcagggcggaagcgcacgcggcgtgaagcggcccagaacccggcggtcacgggaatatccgtcgcgccgagaacgctggttagtcttgtttcgggttccggctgcgttgggcttgcgtgcggctcgctaagactatggcgtccgggcctcattcgacagctactgctgccgcagccgcctcatcggccgccccaagcgcgggcggctccagctccgggacgacgaccacgacgacgaccacgacgggagggatcctgatcggcgatcgcctgtactcggaagtttcacttaccatcgaccactctctgattccggaggagaggctctcgcccaccccatccatgcaggatgggctcgacctgcccagtgagacggacttacgcatcctgggctgcgagctcatccaggccgccggcattctcctccggctgccgcaggtggcgatggcaacggggcaggtgttgtttcatcgttttttctactccaaatctttcgtcaaacacagtttcgagattgttgctatggcttgtattaatcttgcatcaaaaatcgaagaagcacctagaagaataagagatgtgattaatgtattccaccacctccgccagttaagaggaaaaaggactccaagccccctgatccttgatcagaactacattaacaccaaaaatcaagttatcaaagcagagaggagggtgctaaaggagttgggattttgtgttcatgtcaagcatcctcataagatcattgttatgtatttacaagtcttagaatgtgaacgtaatcaaaccctggttcaaactgcctggaattacatgaatgacagtcttcgaaccaatgtgtttgttcgatttcaaccagagactatagcatgtgcttgcatctaccttgcagctagagcacttcagattccgttgccaactcgtccccattggtttcttctttttggtactacagaagaggaaatccaggaaatctgcatagaaacacttaggctttataccagaaaaaagccaaactatgaattactggaaaaagaagtagaaaaaagaaaagtagccttacaagaagccaaattaaaagcaaagggattgaatccggatggaactccagccctttcaaccctgggtggattttctccagcctccaagccatcatcaccaagagaagtaaaagctgaagagaaatcaccaatctccattaatgtgaagacagtcaaaaaagaacctgaggatagacaacaggcttccaaaagcccttacaatggtgtaagaaaagacagcaagagaagtagaaatagcagaagtgcaagtcgatcgaggtcaagaacacgatcacgttctagatcacatactccaagaagacactataataataggcggagtcgatctggaacatacagctcgagatcaagaagcaggtcccgcagtcacagtgaaagccctcgaagacatcataatcatggttctcctcaccttaaggccaagcataccagagatgatttaaaaagttcaaacagacatggtcataaaaggaaaaaatctcgttctcgatctcagagcaagtctcgggatcactcagatgcagccaagaaacacaggcatgaaaggggacatcatagggacaggcgtgaacgatctcgctcctttgagaggtcccataaaagcaagcaccatggtggcagtcgctcaggacatggcaggcacaggcgctgactttctcttcctttgagcctgcatcagttcttggttttgcctatctacagtgtgatgtatggactcaatcaaaaacattaaacgcaaactgattaggatttgatttcttgaaaccctctaggtctctagaacactgaggacagtttcttttgaaaagaactatgttaatttttttgcacattaaaatgccctagcagtatctaattaaaaaccatggtcaggttcaattgtactttattatagttgtgtattgtttattgctataagaactggagcgtgaattctgtaaaaatgtatcttatttttatacagataaaattgcagacactgttctatttaagtggttatttgtttaaatgatggtgaatactttcttaacactggtttgtctgcatgtgtaaagatttttacaaggaaataaaatacaaatcttgttttttctaaa

SEQ ID NO: 79 - protein, 526 aa, Homo sapiens
MASGPHSTATAAAAASSAAPSAGGSSSGTTTTTTTTTGGILIGDRLYSEVSLTIDHSLIPEERLSPTPSMQDGLDLPSETDLRILGCELIQAAGILLRLPQVAMATGQVLFHRFFYSKSFVKHSFEIVAMACINLASKIEEAPRRIRDVINVFHHLRQLRGKRTPSPLILDQNYINTKNQVIKAERRVLKELGFCVHVKHPHKIIVMYLQVLECERNQTLVQTAWNYMNDSLRTNVFVRFQPETIACACIYLAARALQIPLPTRPHWFLLFGTTEEEIQEICIETLRLYTRKKPNYELLEKEVEKRKVALQEAKLKAKGLNPDGTPALSTLGGFSPASKPSSPREVKAEEKSPISINVKTVKKEPEDRQQASKSPYNGVRKDSKRSRNSRSASRSRSRTRSRSRSHTPRRHYNNRRSRSGTYSSRSRSRSRSHSESPRRHHNHGSPHLKAKHTRDDLKSSNRHGHKRKKSRSRSQSKSRDHSDAAKKHRHERGHHRDRRERSRSFERSHKSKHHGGSRSGHGRHRR

SEQ ID NO: 80 - DNA, 2575 bp, Homo sapiens
  CDS (234)..(2006)
gggacacagagggaggaagaagcggcggcggcggcggcggcggcggcggctcctctttgcagagggggaaactcttgggctgagagcaggaataatgcggtaggcaaggcgggctgctggctcccccggctccggcagcagcggcggcagcccgagcagcggcagcagcagcggcagcaccccaggcgctgacagccccgccggccggctccgttgctgaccgccgactgtcaatggagctggaaaacatcgtggccaacacggtcttgctgaaagccagggaagggggcggaggaaagcgcaaagggaaaagcaagaagtggaaagaaatcctgaagttccctcacattagccagtgtgaagacctccgaaggaccatagacagagattactgcagtttatgtgacaagcagccaatcgggaggctgcttttccggcagttttgtgaaaccaggcctgggctggagtgttacattcagttcctggactccgtggcagaatatgaagttactccagatgaaaaactgggagagaaagggaaggaaattatgaccaagtacctcaccccaaagtcccctgttttcatagcccaagttggccaagacctggtctcccagacggaggagaagctcctacagaagccgtgcaaagaactcttttctgcctgtgcacagtctgtccacgagtacctgaggggagaaccattccacgaatatctggacagcatgttttttgaccgctttctccagtggaagtggttggaaaggcaaccggtgaccaaaaacactttcaggcagtatcgagtgctaggaaaagggggcttcggggaggtctgtgcctgccaggttcgggccacgggtaaaatgtatgcctgcaagcgcttggagaagaagaggatcaaaaagaggaaaggggagtccatggccctcaatgagaagcagatcctcgagaaggtcaacagtcagtttgtggtcaacctggcctatgcctacgagaccaaggatgcactgtgcttggtcctgaccatcatgaatgggggtgacctgaagttccacatctacaacatgggcaaccctggcttcgaggaggagcgggccttgttttatgcggcagagatcctctgcggcttagaagacctccaccgtgagaacaccgtctaccgagatctgaaacctgaaaacatcctgttagatgattatggccacattaggatctcagacctgggcttggctgtgaagatccccgagggagacctgatccgcggccgggtgggcactgttggctacatggctccagaggtcctgaacaaccagaggtacggcctgagccccgactactggggccttggctgcctcatctatgagatgatcgagggccagtcgccgttccgcggccgcaaggagaaggtgaagcgggaggaggtggaccgccgggtcctggagacggaggaggtgtactcccacaagttctccgaggaggccaagtccatctgcaagatgctgctcacgaaagatgcgaagcagaggctgggctgccaggaggagggggctgcagaggtcaagagacaccccttcttcaggaacatgaacttcaagcgcttagaagccgggatgttggaccctcccttcgttccagacccccgcgctgtgtactgtaaggacgtgctggacatcgagcagttctccactgtgaagggcgtcaatctggaccacacagacgacgacttctactccaagttctccacgggctctgtgtccatcccatggcaaaacgagatgatagaaacagaatgctttaaggagctgaacgtgtttggacctaatggtaccctcccgccagatctgaacagaaaccaccctccggaaccgcccaagaaagggctgctccagagactcttcaagcggcagcatcagaacaattccaagagttcgcccagctccaagaccagttttaaccaccacataaactcaaaccatgtcagctcgaactccaccggaagcagctagtttcggctctggcctccaagtccacagtggaaccagcccagacccttctccttagaagtggaagtagtggagcccctgctctggtggggctgccaggggagaccccgggagccggggaaggaggccgtccatcccgtcgacgtagaacctcgaggtttctcaaagaaatttccactcaggtctgttttccgaggcggccccggccggggtggattggatttgtctttggtgaacattgcaatagaaatccaattggatacgacaacttgcacgtattttaatagcgtcataactagaactgaattttgtctttatgatttttaaagaaaagttttgtaaatttctctactgtctcagtttacattttgtatatttgtatttaaatgaaagtgagactttgagggtgtatattttctgtgcagccactgttaagccatgtgttccaaggcattttagcggggagggggttatcaaaaaaaaaaaaatgtgactcaagacttccagagcctcaaatgagaaaatgtctttattaaatgtagaaagtgatccataaaaaaaaaaaaaaaaaa

SEQ ID NO: 81 - protein, 590 aa, Homo sapiens
MELENIVANTVLLKAREGGGGKRKGKSKKWKEILKFPHISQCEDLRRTIDRDYCSLCDKQPIGRLLFRQFCETRPGLECYIQFLDSVAEYEVTPDEKLGEKGKEIMTKYLTPKSPVFIAQVGQDLVSQTEEKLLQKPCKELFSACAQSVHEYLRGEPFHEYLDSMFFDRFLQWKWLERQPVTKNTFRQYRVLGKGGFGEVCACQVRATGKMYACKRLEKKRIKKRKGESMALNEKQILEKVNSQFVVNLAYAYETKDALCLVLTIMNGGDLKFHIYNMGNPGFEEERALFYAAEILCGLEDLHRENTVYRDLKPENILLDDYGHIRISDLGLAVKIPEGDLIRGRVGTVGYMAPEVLNNQRYGLSPDYWGLGCLIYEMIEGQSPFRGRKEKVKREEVDRRVLETEEVYSHKFSEEAKSICKMLLTKDAKQRLGCQEEGAAEVKRHPFFRNMNFKRLEAGMLDPPFVPDPRAVYCKDVLDIEQFSTVKGVNLDHTDDDFYSKFSTGSVSIPWQNEMIETECFKELNVFGPNGTLPPDLNRNHPPEPPKKGLLQRLFKRQHQNNSKSSPSSKTSFNHHINSNHVSSNSTGSS

SEQ ID NO: 82 - DNA, 4298 bp, Homo sapiens
  CDS (642)..(3026)
cagacaggatattcactgctgtggcaaggcctgtagagagtttcgaagttaggaggactcaagacggtccctccctggacttttctgaaggggctcaaaagatgacacgcgccagagctggaaggcgtcgccaattggtccaacttttccctcctccctttttgcggatgagaaaaactgaggcccaggtttgggatttccagagcccgggatttcccggcaacgccgacaaccacattcccccggctattctgacccgccccggttccgggacgctccctgggagccgccgccgagggcctgctgggactcccggggaccccgccgtcggggcagcccccacgcccggcgccgcccgccggaacggcgccgctgttgcgcacttgcaggggagccggcgactgagggcgaggcagggagggagcaagcggggctgggagggctgctggcgcgggctcgccggctgtgtatggtctatcgcaggcagctgacctttgaggaggaaatcgctgctctccgctccttcctgtagtaacagccgccgctgccgccgccgccaggaaccccggccgggagcgagagccgcggggcgcagagccggcccggctgccggacggtgcggccccaccaggtgaacggccatggcgggctggatccaggcccagcagctgcagggagacgcgctgcgccagatgcaggtgctgtacggccagcacttccccatcgaggtccggcactacttggcccagtggattgagagccagccatgggatgccattgacttggacaatccccaggacagagcccaagccacccagctcctggagggcctggtgcaggagctgcagaagaaggcggagcaccaggtgggggaagatgggtttttactgaagatcaagctggggcactacgccacgcagctccagaaaacatatgaccgctgccccctggagctggtccgctgcatccggcacattctgtacaatgaacagaggctggtccgagaagccaacaattgcagctctccggctgggatcctggttgacgccatgtcccagaagcaccttcagatcaaccagacatttgaggagctgcgactggtcacgcaggacacagagaatgagctgaagaaactgcagcagactcaggagtacttcatcatccagtaccaggagagcctgaggatccaagctcagtttgcccagctggcccagctgagcccccaggagcgtctgagccgggagacggccctccagcagaagcaggtgtctctggaggcctggttgcagcgtgaggcacagacactgcagcagtaccgcgtggagctggccgagaagcaccagaagaccctgcagctgctgcggaagcagcagaccatcatcctggatgacgagctgatccagtggaagcggcggcagcagctggccgggaacggcgggccccccgagggcagcctggacgtgctacagtcctggtgtgagaagttggccgagatcatctggcagaaccggcagcagatccgcagggctgagcacctctgccagcagctgcccatccccggcccagtggaggagatgctggccgaggtcaacgccaccatcacggacattatctcagccctggtgaccagcacattcatcattgagaagcagcctcctcaggtcctgaagacccagaccaagtttgcagccaccgtacgcctgctggtgggcgggaagctgaacgtgcacatgaatcccccccaggtgaaggccaccatcatcagtgagcagcaggccaagtctctgcttaaaaatgagaacacccgcaacgagtgcagtggtgagatcctgaacaactgctgcgtgatggagtaccaccaagccacgggcaccctcagtgcccacttcaggaacatgtcactgaagaggatcaagcgtgctgaccggcggggtgcagagtccgtgacagaggagaagttcacagtcctgtttgagtctcagttcagtgttggcagcaatgagcttgtgttccaggtgaagactctgtccctacctgtggttgtcatcgtccacggcagccaggaccacaatgccacggctactgtgctgtgggacaatgcctttgctgagccgggcagggtgccatttgccgtgcctgacaaagtgctgtggccgcagctgtgtgaggcgctcaacatgaaattcaaggccgaagtgcagagcaaccggggcctgaccaaggagaacctcgtgttcctggcgcagaaactgttcaacaacagcagcagccacctggaggactacagtggcctgtccgtgtcctggtcccagttcaacagggagaacttgccgggctggaactacaccttctggcagtggtttgacggggtgatggaggtgttgaagaagcaccacaagccccactggaatgatggggccatcctaggttttgtgaataagcaacaggcccacgacctgctcatcaacaagcccgacgggaccttcttgttgcgctttagtgactcagaaatcgggggcatcaccatcgcctggaagtttgactccccggaacgcaacctgtggaacctgaaaccattcaccacgcgggatttctccatcaggtccctggctgaccggctgggggacctgagctatctcatctatgtgtttcctgaccgccccaaggatgaggtcttctccaagtactacactcctgtgctggctaaagctgttgatggatatgtgaaaccacagatcaagcaagtggtccctgagtttgtgaatgcatctgcagatgctgggggcagcagcgccacgtacatggaccaggccccctccccagctgtgtgcccccaggctccctataacatgtacccacagaaccctgaccatgtactcgatcaggatggagaattcgacctggatgagaccatggatgtggccaggcacgtggaggaactcttacgccgaccaatggacagtcttgactcccgcctctcgccccctgccggtcttttcacctctgccagaggctccctctcatgaatgtttgaatcccacgcttctctttggaaacaatatgcaatgtgaagcggtcgtgttgtgagtttagtaaggttgtgtacactgacacctttgcaggcatgcatgtgcttgtgtgtgtgtgtgtgtgtgtgtccttgtgcatgagctacgcctgcctcccctgtgcagtcctgggatgtggctgcagcagcggtggcctcttttcagatcatggcatccaagagtgcgccgagtctgtctctgtcatggtagagaccgagcctctgtcactgcaggcactcaatgcagccagacctattcctcctgggcccctcatctgctcagcagctatttgaatgagatgattcagaaggggaggggagacaggtaacgtctgtaagctgaagtttcactccggagtgagaagctttgccctcctaagagagagagacagagagacagagagagagaaagagagagtgtgtgggtctatgtaaatgcatctgtcctcatgtgttgatgtaaccgattcatctctcagaagggaggctgggggttcattttcgagtagtattttatactttagtgaacgtggactccagactctctgtgaaccctatgagagcgcgtctgggcccggccatgtccttagcacaggggggccgccggtttgagtgagggtttctgagctgctctgaattagtccttgcttggctgcttggccttgggcttcattcaagtctatgatgctgttgcccacgtttcccgggatatatattctctcccctccgttgggccccagccttctttgcttgcctctctgtttgtaaccttgtcgacaaagaggtagaaaagattgggtctaggatatggtgggtggacaggggccccgggacttggagggttggtcctcttgcctcctggaaaaaacaaaaacaaaaaactgcagtgaaagacaagctgcaaatcagccatgtgctgcgtgcctgtggaatctggagtgaggggtaaaagctgatctggtttgactccgctggaggtggggcctggagcaggccttgcgctgttgcgtaactggctgtgttctggtgaggccttgctcccaaccccacacgctcctccctctgaggctgtaggactcgcagtcaggggcagctgaccatggaagattgagagcccaaggtttaaacttctctgaagggaggtggggatgagaagaggggtttttttgtactttgtacaaagaccacacatttgtgtaaacagtgttttggaataaaatatttttttcat

SEQ ID NO: 83 - protein, 794 aa, Homo sapiens
MAGWIQAQQLQGDALRQMQVLYGQHFPIEVRHYLAQWIESQPWDAIDLDNPQDRAQATQLLEGLVQELQKKAEHQVGEDGFLLKIKLGHYATQLQKTYDRCPLELVRCIRHILYNEQRLVREANNCSSPAGILVDAMSQKHLQINQTFEELRLVTQDTENELKKLQQTQEYFIIQYQESLRIQAQFAQLAQLSPQERLSRETALQQKQVSLEAWLQREAQTLQQYRVELAEKHQKTLQLLRKQQTIILDDELIQWKRRQQLAGNGGPPEGSLDVLQSWCEKLAEIIWQNRQQIRRAEHLCQQLPIPGPVEEMLAEVNATITDIISALVTSTFIIEKQPPQVLKTQTKFAATVRLLVGGKLNVHMNPPQVKATIISEQQAKSLLKNENTRNECSGEILNNCCVMEYHQATGTLSAHFRNMSLKRIKRADRRGAESVTEEKFTVLFESQFSVGSNELVFQVKTLSLPVVVIVHGSQDHNATATVLWDNAFAEPGRVPFAVPDKVLWPQLCEALNMKFKAEVQSNRGLTKENLVFLAQKLFNNSSSHLEDYSGLSVSWSQFNRENLPGWNYTFWQWFDGVMEVLKKHHKPHWNDGAILGFVNKQQAHDLLINKPDGTFLLRFSDSEIGGITIAWKFDSPERNLWNLKPFTTRDFSIRSLADRLGDLSYLIYVFPDRPKDEVFSKYYTPVLAKAVDGYVKPQIKQVVPEFVNASADAGGSSATYMDQAPSPAVCPQAPYNMYPQNPDHVLDQDGEFDLDETMDVARHVEELLRRPMDSLDSRLSPPAGLFTSARGSLS

SEQ ID NO: 84 - DNA, 1673 bp, Homo sapiens
  CDS (107)..(1309)
tcccttctgaggaaacgaaaccaacagcagtccaagctcagtcagcagaagagataaaagcaaacaggtctgggaggcagttctgttgccactctctctcctgtcaatgatggatctcagaaataccccagccaaatctctggacaagttcattgaagactatctcttgccagacacgtgtttccgcatgcaaatcaaccatgccattgacatcatctgtgggttcctgaaggaaaggtgcttccgaggtagctcctaccctgtgtgtgtgtccaaggtggtaaagggtggctcctcaggcaagggcaccaccctcagaggccgatctgacgctgacctggttgtcttcctcagtcctctcaccacttttcaggatcagttaaatcgccggggagagttcatccaggaaattaggagacagctggaagcctgtcaaagagagagagcattttccgtgaagtttgaggtccaggctccacgctggggcaacccccgtgcgctcagcttcgtactgagttcgctccagctcggggagggggtggagttcgatgtgctgcctgcctttgatgccctgggtcagttgactggcggctataaacctaacccccaaatctatgtcaagctcatcgaggagtgcaccgacctgcagaaagagggcgagttctccacctgcttcacagaactacagagagacttcctgaagcagcgccccaccaagctcaagagcctcatccgcctagtcaagcactggtaccaaaattgtaagaagaagcttgggaagctgccacctcagtatgccctggagctcctgacggtctatgcttgggagcgagggagcatgaaaacacatttcaacacagcccagggatttcggacggtcttggaattagtcataaactaccagcaactctgcatctactggacaaagtattatgactttaaaaaccccattattgaaaagtacctgagaaggcagctcacgaaacccaggcctgtgatcctggacccggcggaccctacaggaaacttgggtggtggagacccaaagggttggaggcagctggcacaagaggctgaggcctggctgaattacccatgctttaagaattgggatgggtccccagtgagctcctggattctgctggctgaaagcaacagtgcagacgatgagaccgacgatcccaggaggtatcagaaatatggttacattggaacacatgagtaccctcatttctctcatagacccagcacactccaggcagcatccaccccacaggcagaagaggactggacctgcaccatcctctgaatgccagtgcatcttgggggaaagggctccagtgttatctggaccagttccttcattttcaggtgggactcttgatccagagaggacaaagctcctcagtgagctggtgtataatccaggacagaacccaggtctcctgactcctggccttctatgccctctatcctatcatagataacattctccacagcctcacttcattccacctattctctgaaaatattccctgagagagaacagagagatttagataagagaatgaaattccagccttgactttcttctgtgcacctgatgggagggtaatgtctaatgtattatcaataacaataaaaataaagcaaataccatttaaaaaaaaaaa

SEQ ID NO: 85 - protein, 400 aa, Homo sapiens
MMDLRNTPAKSLDKFIEDYLLPDTCFRMQINHAIDIICGFLKERCFRGSSYPVCVSKVVKGGSSGKGTTLRGRSDADLVVFLSPLTTFQDQLNRRGEFIQEIRRQLEACQRERAFSVKFEVQAPRWGNPRALSFVLSSLQLGEGVEFDVLPAFDALGQLTGGYKPNPQIYVKLIEECTDLQKEGEFSTCFTELQRDFLKQRPTKLKSLIRLVKHWYQNCKKKLGKLPPQYALELLTVYAWERGSMKTHFNTAQGFRTVLELVINYQQLCIYWTKYYDFKNPIIEKYLRRQLTKPRPVILDPADPTGNLGGGDPKGWRQLAQEAEAWLNYPCFKNWDGSPVSSWILLAESNSADDETDDPRRYQKYGYIGTHEYPHFSHRPSTLQAASTPQAEEDWTCTIL

SEQ ID NO: 86 - DNA, 1470 bp, Homo sapiens
  CDS (107)..(1201)
tcccttctgaggaaacgaaaccaacagcagtccaagctcagtcagcagaagagataaaagcaaacaggtctgggaggcagttctgttgccactctctctcctgtcaatgatggatctcagaaataccccagccaaatctctggacaagttcattgaagactatctcttgccagacacgtgtttccgcatgcaaatcaaccatgccattgacatcatctgtgggttcctgaaggaaaggtgcttccgaggtagctcctaccctgtgtgtgtgtccaaggtggtaaagggtggctcctcaggcaagggcaccaccctcagaggccgatctgacgctgacctggttgtcttcctcagtcctctcaccacttttcaggatcagttaaatcgccggggagagttcatccaggaaattaggagacagctggaagcctgtcaaagagagagagcattttccgtgaagtttgaggtccaggctccacgctggggcaacccccgtgcgctcagcttcgtactgagttcgctccagctcggggagggggtggagttcgatgtgctgcctgcctttgatgccctgggtcagttgactggcggctataaacctaacccccaaatctatgtcaagctcatcgaggagtgcaccgacctgcagaaagagggcgagttctccacctgcttcacagaactacagagagacttcctgaagcagcgccccaccaagctcaagagcctcatccgcctagtcaagcactggtaccaaaattgtaagaagaagcttgggaagctgccacctcagtatgccctggagctcctgacggtctatgcttgggagcgagggagcatgaaaacacatttcaacacagcccagggatttcggacggtcttggaattagtcataaactaccagcaactctgcatctactggacaaagtattatgactttaaaaaccccattattgaaaagtacctgagaaggcagctcacgaaacccaggcctgtgatcctggacccggcggaccctacaggaaacttgggtggtggagacccaaagggttggaggcagctggcacaagaggctgaggcctggctgaattacccatgctttaagaattgggatgggtccccagtgagctcctggattctgctggtgagacctcctgcttcctccctgccattcatccctgcccctctccatgaagcttgagacatatagctggagaccattctttccaaagaacttacctcttgccaaaggccatttatattcatatagtgacaggctgtgctccatattttacagtcattttggtcacaatcgagggtttctggaattttcacatcccttgtccagaattcattcccctaagagtaataataaataatctctaacaccatttattgactgtctgcttcgggctcaggttctgtcctaagccctttaatatgcactctctcattaaatagtcacaacaa

SEQ ID NO: 87 - protein, 364 aa, Homo sapiens
MMDLRNTPAKSLDKFIEDYLLPDTCFRMQINHAIDIICGFLKERCFRGSSYPVCVSKVVKGGSSGKGTTLRGRSDADLVVFLSPLTTFQDQLNRRGEFIQEIRRQLEACQRERAFSVKFEVQAPRWGNPRALSFVLSSLQLGEGVEFDVLPAFDALGQLTGGYKPNPQIYVKLIEECTDLQKEGEFSTCFTELQRDFLKQRPTKLKSLIRLVKHWYQNCKKKLGKLPPQYALELLTVYAWERGSMKTHFNTAQGFRTVLELVINYQQLCIYWTKYYDFKNPIIEKYLRRQLTKPRPVILDPADPTGNLGGGDPKGWRQLAQEAEAWLNYPCFKNWDGSPVSSWILLVRPPASSLPFIPAPLHEA

SEQ ID NO: 88 - DNA, 1575 bp, Homo sapiens
  CDS (107)..(1351)
tcccttctgaggaaacgaaaccaacagcagtccaagctcagtcagcagaagagataaaagcaaacaggtctgggaggcagttctgttgccactctctctcctgtcaatgatggatctcagaaataccccagccaaatctctggacaagttcattgaagactatctcttgccagacacgtgtttccgcatgcaaatcaaccatgccattgacatcatctgtgggttcctgaaggaaaggtgcttccgaggtagctcctaccctgtgtgtgtgtccaaggtggtaaagggtggctcctcaggcaagggcaccaccctcagaggccgatctgacgctgacctggttgtcttcctcagtcctctcaccacttttcaggatcagttaaatcgccggggagagttcatccaggaaattaggagacagctggaagcctgtcaaagagagagagcattttccgtgaagtttgaggtccaggctccacgctggggcaacccccgtgcgctcagcttcgtactgagttcgctccagctcggggagggggtggagttcgatgtgctgcctgcctttgatgccctgggtcagttgactggcggctataaacctaacccccaaatctatgtcaagctcatcgaggagtgcaccgacctgcagaaagagggcgagttctccacctgcttcacagaactacagagagacttcctgaagcagcgccccaccaagctcaagagcctcatccgcctagtcaagcactggtaccaaaattgtaagaagaagcttgggaagctgccacctcagtatgccctggagctcctgacggtctatgcttgggagcgagggagcatgaaaacacatttcaacacagcccagggatttcggacggtcttggaattagtcataaactaccagcaactctgcatctactggacaaagtattatgactttaaaaaccccattattgaaaagtacctgagaaggcagctcacgaaacccaggcctgtgatcctggacccggcggaccctacaggaaacttgggtggtggagacccaaagggttggaggcagctggcacaagaggctgaggcctggctgaattacccatgctttaagaattgggatgggtccccagtgagctcctggattctgctgacccagcacactccaggcagcatccaccccacaggcagaagaggactggacctgcaccatcctctgaatgccagtgcatcttgggggaaagggctccagtgttatctggaccagttccttcattttcaggtgggactcttgatccagagaggacaaagctcctcagtgagctggtgtataatccaggacagaacccaggtctcctgactcctggccttctatgccctctatcctatcatagataacattctccacagcctcacttcattccacctattctctgaaaatattccctgagagagaacagagagatttagataagagaatgaaattccagccttgactttcttctgtgcacctgatgggagggtaatgtctaatgtattatcaataacaataaaaataaagcaaataccatttaaaaaaaaaaa

SEQ ID NO: 89 - protein, 414 aa, Homo sapiens
MMDLRNTPAKSLDKFIEDYLLPDTCFRMQINHAIDIICGFLKERCFRGSSYPVCVSKVVKGGSSGKGTTLRGRSDADLVVFLSPLTTFQDQLNRRGEFIQEIRRQLEACQRERAFSVKFEVQAPRWGNPRALSFVLSSLQLGEGVEFDVLPAFDALGQLTGGYKPNPQIYVKLIEECTDLQKEGEFSTCFTELQRDFLKQRPTKLKSLIRLVKHWYQNCKKKLGKLPPQYALELLTVYAWERGSMKTHFNTAQGFRTVLELVINYQQLCIYWTKYYDFKNPIIEKYLRRQLTKPRPVILDPADPTGNLGGGDPKGWRQLAQEAEAWLNYPCFKNWDGSPVSSWILLTQHTPGSIHPTGRRGLDLHHPLNASASWGKGLQCYLDQFLHFQVGLLIQRGQSSSVSWCIIQDRTQVS

SEQ ID NO: 90 - DNA, 1559 bp, Homo sapiens
  CDS (120)..(1097)
tagttcaagacaacagagacaaagctaagatgaggaagttctgtacagtttaggaaatagaggctttcaaagataattcgcagtgatgtgaaactggcctcccaagccctgataacaacatggccaacgccctggccagcgccacttgcgagcgctgcaagggcggctttgcgcccgctgagaagatcgtgaacagtaatggggagctgtaccatgagcagtgtttcgtgtgcgctcagtgcttccagcagttcccagaaggactcttctatgagtttgaaggaagaaagtactgtgaacatgactttcagatgctctttgccccttgctgtcatcagtgtggtgaattcatcattggccgagttatcaaagccatgaataacagctggcatccggagtgcttccgctgtgacctctgccaggaagttctggcagatatcgggtttgtcaagaatgctgggagacacctgtgtcgcccctgtcataatcgtgagaaagccagaggccttgggaaatacatctgccagaaatgccatgctatcatcgatgagcagcctctgatattcaagaacgacccctaccatccagaccatttcaactgcgccaactgcgggaaggagctgactgccgatgcacgggagctgaaaggggagctatactgcctcccatgccatgataaaatgggggtccccatctgtggtgcttgccgacggcccatcgaagggcgcgtggtgaacgctatgggcaagcagtggcatgtggagcattttgtttgtgccaagtgtgagaaaccctttcttggacatcgccattatgagaggaaaggcctggcatattgtgaaactcactataaccagctatttggtgatgtttgcttccactgcaatcgtgttatagaaggtgatgtggtctctgctcttaataaggcctggtgcgtgaactgctttgcctgttctacctgcaacactaaattaacactcaagaataagtttgtggagtttgacatgaagccagtctgtaagaagtgctatgagaaatttccattggagctgaagaaaagacttaagaaactagctgagaccttaggaaggaaataagttcctttattttttcttttctatgcaagataagagattaccaacattacttgtcttgatctacccatatttaaagctatatctcaaagcagttgagagaagaggacctatatgaatggttttatgtcatttttttaattaaaaaagaaaaattcatataatcgtgtttaaaacacaaatgaagtcagtatttgcctttgttaacccttatccatttgttgacatgtagactgtttacaaaaaaaaaacacatggttaaatgttaaattttaattaaggcccccaaaaattaaatataactttttaaaatgaaaggagtcaccttttacatgactcaggtgaaaaaacagtataaacattaatttactttgtgttcaaaagaaaattccaactgctgttggggaaggacacagaaaagaaaaataaccacccaaaaaaaaaaaaaaaaaaaaaaaaaaaaaa

SEQ ID NO: 91 - protein, 325 aa, Homo sapiens
MANALASATCERCKGGFAPAEKIVNSNGELYHEQCFVCAQCFQQFPEGLFYEFEGRKYCEHDFQMLFAPCCHQCGEFIIGRVIKAMNNSWHPECFRCDLCQEVLADIGFVKNAGRHLCRPCHNREKARGLGKYICQKCHAIIDEQPLIFKNDPYHPDHFNCANCGKELTADARELKGELYCLPCHDKMGVPICGACRRPIEGRVVNAMGKQWHVEHFVCAKCEKPFLGHRHYERKGLAYCETHYNQLFGDVCFHCNRVIEGDVVSALNKAWCVNCFACSTCNTKLTLKNKFVEFDMKPVCKKCYEKFPLELKKRLKKLAETLGRK

SEQ ID NO: 92 - DNA, 3686 bp, Homo sapiens
  CDS (223)..(2010)
atacgggagaactaaggctgaaacctcggaggaacaaccacttttgaagtgacttcgcggcgtgcgttgggtgcggactaggtggccgcggcgggagtgtgctggagcctgaagtccacgcgcgcggctgagaaccgccgggaccgcacgtgggcgccgcgcgcttcccccgcttcccaggtgggcgccggccgccaggccacctcacgtccggccccggggatgcgcgtcctcctcgccgcgctgggactgctgttcctgggggcgctacgagccttcccacaggatcgacccttcgaggacacctgtcatggaaaccccagccactactatgacaaggctgtcaggaggtgctgttaccgctgccccatggggctgttcccgacacagcagtgcccacagaggcctactgactgcaggaagcagtgtgagcctgactactacctggatgaggccgaccgctgtacagcctgcgtgacttgttctcgagacgacctcgtggagaagacgccgtgtgcatggaactcctcccgtgtctgcgaatgtcgacccggcatgttctgttccacgtctgccgtcaactcctgtgcccgctgcttcttccattctgtctgtccggcagggatgattgtcaagttcccaggcacggcgcagaagaacacggtctgtgagccggcttccccaggggtcagccctgcctgtgccagcccagagaactgcaaggaaccctccagtggcaccatcccccaggccaagcccaccccggtgtccccagcaacctccagtgccagcaccatgcctgtaagagggggcacccgcctcgcccaggaagctgcttctaaactgacgagggctcccgactctccctcctctgtgggaaggcctagttcagatccaggtctgtccccaacacagccatgcccagaggggtctggtgattgcagaaagcagtgtgagcccgactactacctggacgaggccggccgctgcacggcctgcgtgagctgttctcgagatgaccttgtggagaagacgccatgtgcatggaactcctcccgcacctgcgaatgtcgacctggcatgatctgtgccacatcagccaccaactcccgtgcccgctgtgtcccctacccaatctgtgcagcagagacggtcaccaagccccaggatatggctgagaaggacaccacctttgaggcgccacccctggggacccagccggactgcaaccccaccccagagaatggcgaggcgcctgccagcaccagccccactcagagcttgctggtggactcccaggccagtaagacgctgcccatcccaaccagcgctcccgtcgctctctcctccacggggaagcccgttctggatgcagggccagtgctcttctgggtgatcctggtgttggttgtggtggtcggctccagcgccttcctcctgtgccaccggagggcctgcaggaagcgaattcggcagaagctccacctgtgctacccggtccagacctcccagcccaagctagagcttgtggattccagacccaggaggagctcaacgcagctgaggagtggtgcgtcggtgacagaacccgtcgcggaagagcgagggttaatgagccagccactgatggagacctgccacagcgtgggggcagcctacctggagagcctgccgctgcaggatgccagcccggccgggggcccctcgtcccccagggaccttcctgagccccgggtgtccacggagcacaccaataacaagattgagaaaatctacatcatgaaggctgacaccgtgatcgtggggaccgtgaaggctgagctgccggagggccggggcctggcggggccagcagagcccgagttggaggaggagctggaggcggaccataccccccactaccccgagcaggagacagaaccgcctctgggcagctgcagcgatgtcatgctctcagtggaagaggaagggaaagaagaccccttgcccacagctgcctctggaaagtgaggcctgggctgggctggggctaggagggcagcagggtggcctctgggaggccaggatggcactgttggcaccgaggttgggggcagaggcccatctggcctgaactgaggctccagcatctagtggtggaccggccggtcactgcaggggtctggtggtctctgcttgcatccccaacttagctgtcccctgacccagagcctaggggatccggggcttgtacagaagagacagtccaaggggactggatcccagcagtgatgttggttgaggcagcaaacagatggcaggatgggcactgccgagaacagcattggtcccagagccctgggcatcagaccttaaccaccaggcccacagcccagcgagggagaggtcgtgaggccagctcccggggcccctgtaaccctactctcctctctccctggacctcagaggtgacacccattgggcccttccggcatgcccccagttactgtaaatgtggcccccagtgggcatggagccagtgcctgtggttgtttctccagagtcaaaagggaagtcgagggatggggcgtcgtcagctggcactgtctctgctgcagcggccacactgtactctgcactggtgtgagggcccctgcctggactgtgggaccctcctggtgctgcccaccttccctgtcctgtagccccctcggtgggcccagggcctagggcccaggatcaagtcactcatctcagaatgtccccaccaatccccgccacagcaggcgcctcgggtcccagatgtctgcagccctcagcagctgcagaccgcccctcaccaacccagagaacctgctttactttgcccagggacttcctccccatgtgaacatggggaacttcgggccctgcctggagtccttgaccgctctctgtgggccccacccactctgtcctgggaaatgaagaagcatcttccttaggtctgccctgcttgcaaatccactagcaccgaccccaccacctggttccggctctgcacgctttggggtgtggatgtcgagaggcaccacggcctcacccaggcatctgctttactctggaccataggaaacaagaccgtttggaggtttcatcaggattttgggtttttcacatttcacgctaaggagtagtggccctgacttccggtcggctggccagctgactccctagggccttcagacgtgtatgcaaatgagtgatggataaggatgagtcttggagttgcgggcagcctggagactcgtggacttaccgcctggaggcaggcccgggaaggctgctgtttactcatcgggcagccacgtgctctctggaggaagtgatagtttctgaaaccgctcagatgttttggggaaagttggagaagccgtggccttgcgagaggtggttacaccagaacctggacattggccagaagaagcttaagtgggcagacactgtttgcccagtgtttgtgcaaggatggagtgggtgtctctgcatcacccacagccgcagctgtaaggcacgctggaaggcacacgcctgccaggcagggcagtctggcgcccatgatgggagggattgacatgtttcaacaaaataatgcacttccttacctagtggcccttcacacaacttttgaatctctaaaaatccataaaatccttaaagaactgtaa

SEQ ID NO: 93 - protein, 595 aa, Homo sapiens
MRVLLAALGLLFLGALRAFPQDRPFEDTCHGNPSHYYDKAVRRCCYRCPMGLFPTQQCPQRPTDCRKQCEPDYYLDEADRCTACVTCSRDDLVEKTPCAWNSSRVCECRPGMFCSTSAVNSCARCFFHSVCPAGMIVKFPGTAQKNTVCEPASPGVSPACASPENCKEPSSGTIPQAKPTPVSPATSSASTMPVRGGTRLAQEAASKLTRAPDSPSSVGRPSSDPGLSPTQPCPEGSGDCRKQCEPDYYLDEAGRCTACVSCSRDDLVEKTPCAWNSSRTCECRPGMICATSATNSRARCVPYPICAAETVTKPQDMAEKDTTFEAPPLGTQPDCNPTPENGEAPASTSPTQSLLVDSQASKTLPIPTSAPVALSSTGKPVLDAGPVLFWVILVLVVVVGSSAFLLCHRRACRKRIRQKLHLCYPVQTSQPKLELVDSRPRRSSTQLRSGASVTEPVAEERGLMSQPLMETCHSVGAAYLESLPLQDASPAGGPSSPRDLPEPRVSTEHTNNKIEKIYIMKADTVIVGTVKAELPEGRGLAGPAEPELEEELEADHTPHYPEQETEPPLGSCSDVMLSVEEEGKEDPLPTAASGK

SEQ ID NO: 94 - DNA, 2361 bp, Homo sapiens
  CDS (287)..(685)
cttgtgtggttgcagcaaggcaaagagtgtggggcgtctctgtgttccagggccagtgctcttctgggtgatcctggtgttggttgtggtggtcggctccagcgccttcctcctgtgccaccggagggcctgcaggaagcgaattcggcagaagctccacctgtgctacccggtccagacctcccagcccaagctagagcttgtggattccagacccaggaggagctcaacgcagctgaggagtggtgcgtcggtgacagaacccgtcgcggaagagcgagggttaatgagccagccactgatggagacctgccacagcgtgggggcagcctacctggagagcctgccgctgcaggatgccagcccggccgggggcccctcgtcccccagggaccttcctgagccccgggtgtccacggagcacaccaataacaagattgagaaaatctacatcatgaaggctgacaccgtgatcgtggggaccgtgaaggctgagctgccggagggccggggcctggcggggccagcagagcccgagttggaggaggagctggaggcggaccataccccccactaccccgagcaggagacagaaccgcctctgggcagctgcagcgatgtcatgctctcagtggaagaggaagggaaagaagaccccttgcccacagctgcctctggaaagtgaggcctgggctgggctggggctaggagggcagcagggtggcctctgggaggccaggatggcactgttggcaccgaggttgggggcagaggcccatctggcctgaactgaggctccagcatctagtggtggaccggccggtcactgcaggggtctggtggtctctgcttgcatccccaacttagctgtcccctgacccagagcctaggggatccggggcttgtacagaagagacagtccaaggggactggatcccagcagtgatgttggttgaggcagcaaacagatggcaggatgggcactgccgagaacagcattggtcccagagccctgggcatcagaccttaaccaccaggcccacagcccagcgagggagaggtcgtgaggccagctcccggggcccctgtaaccctactctcctctctccctggacctcagaggtgacacccattgggcccttccggcatgcccccagttactgtaaatgtggcccccagtgggcatggagccagtgcctgtggttgtttctccagagtcaaaagggaagtcgagggatggggcgtcgtcagctggcactgtctctgctgcagcggccacactgtactctgcactggtgtgagggcccctgcctggactgtgggaccctcctggtgctgcccaccttccctgtcctgtagccccctcggtgggcccagggcctagggcccaggatcaagtcactcatctcagaatgtccccaccaatccccgccacagcaggcgcctcgggtcccagatgtctgcagccctcagcagctgcagaccgcccctcaccaacccagagaacctgctttactttgcccagggacttcctccccatgtgaacatggggaacttcgggccctgcctggagtccttgaccgctctctgtgggccccacccactctgtcctgggaaatgaagaagcatcttccttaggtctgccctgcttgcaaatccactagcaccgaccccaccacctggttccggctctgcacgctttggggtgtggatgtcgagaggcaccacggcctcacccaggcatctgctttactctggaccataggaaacaagaccgtttggaggtttcatcaggattttgggtttttcacatttcacgctaaggagtagtggccctgacttccggtcggctggccagctgactccctagggccttcagacgtgtatgcaaatgagtgatggataaggatgagtcttggagttgcgggcagcctggagactcgtggacttaccgcctggaggcaggcccgggaaggctgctgtttactcatcgggcagccacgtgctctctggaggaagtgatagtttctgaaaccgctcagatgttttggggaaagttggagaagccgtggccttgcgagaggtggttacaccagaacctggacattggccagaagaagcttaagtgggcagacactgtttgcccagtgtttgtgcaaggatggagtgggtgtctctgcatcacccacagccgcagctgtaaggcacgctggaaggcacacgcctgccaggcagggcagtctggcgcccatgatgggagggattgacatgtttcaacaaaataatgcacttccttacctagtggcccttcacacaacttttgaatctctaaaaatccataaaatccttaaagaactgtaa

SEQ ID NO: 95 - protein, 132 aa, Homo sapiens
MSQPLMETCHSVGAAYLESLPLQDASPAGGPSSPRDLPEPRVSTEHTNNKIEKIYIMKADTVIVGTVKAELPEGRGLAGPAEPELEEELEADHTPHYPEQETEPPLGSCSDVMLSVEEEGKEDPLPTAASGK

SEQ ID NO: 96 - DNA, 4396 bp, Homo sapiens
  CDS (31)..(1995)
gcctgaggtgcccgccctggccccaggagaatgaaccagccgcagaggatggcgcctgtgggcacagacaaggagctcagtgacctcctggacttcagcatgatgttcccgctgcctgtcaccaacgggaagggccggcccgcctccctggccggggcgcagttcggaggttcaggtcttgaggaccggcccagctcaggctcctggggcagcggcgaccagagcagctcctcctttgaccccagccggaccttcagcgagggcacccacttcactgagtcgcacagcagcctctcttcatccacattcctgggaccgggactcggaggcaagagcggtgagcggggcgcctatgcctccttcgggagagacgcaggcgtgggcggcctgactcaggctggcttcctgtcaggcgagctggccctcaacagccccgggcccctgtccccttcgggcatgaaggggacctcccagtactacccctcctactccggcagctcccggcggagagcggcagacggcagcctagacacgcagcccaagaaggtccggaaggtcccgccgggtcttccatcctcggtgtacccacccagctcaggtgaggactacggcagggatgccaccgcctacccgtccgccaagacccccagcagcacctatcccgcccccttctacgtggcagatggcagcctgcacccctcagccgagctctggagtcccccgggccaggcgggcttcgggcccatgctgggtgggggctcatccccgctgcccctcccgcccggtagcggcccggtgggcagcagtggaagcagcagcacgtttggtggcctgcaccagcacgagcgtatgggctaccagctgcatggagcagaggtgaacggtgggctcccatctgcatcctccttctcctcagcccccggagccacgtacggcggcgtctccagccacacgccgcctgtcagcggggccgacagcctcctgggctcccgagggaccacagctggcagctccggggatgccctcggcaaagcactggcctcgatctactccccggatcactcaagcaataacttctcgtccagcccttctacccccgtgggctccccccagggcctggcaggaacgtcacagtggcctcgagcaggagcccccggtgccttatcgcccagctacgacgggggtctccacggcctgcagagtaagatagaagaccacctggacgaggccatccacgtgctccgcagccacgccgtgggcacagccggcgacatgcacacgctgctgcctggccacggggcgctggcctcaggtttcaccggccccatgtcgctgggtgggcggcacgcaggcctggttggaggcagccaccccgaggacggcctcgcaggcagcaccagcctcatgcacaaccacgcggccctccccagccagccaggcaccctccctgacctgtctcggcctcccgactcctacagtgggctagggcgagcaggtgccacggcggccgccagcgagatcaagcgggaggagaaggaggacgaggagaacacgtcagcggctgaccactcggaggaggagaagaaggagctgaaggccccccgggcccggaccagcccagacgaggacgaggacgaccttctccccccagagcagaaggccgagcgggagaaggagcgccgggtggccaataacgcccgggagcggctgcgggtccgtgacatcaacgaggcctttaaggagctggggcgcatgtgccaactgcacctcaacagcgagaagccccagaccaaactgctcatcctgcaccaggctgtctcggtcatcctgaacttggagcagcaagtgcgagagcggaacctgaatcccaaagcagcctgtttgaaacggcgagaagaggaaaaggtgtcaggtgtggttggagacccccagatggtgctttcagctccccacccaggcctgagcgaagcccacaaccccgccgggcacatgtgaaaggtatgcctccgtgggacgagccacccgctttcagccctgtgctctggccccagaagccggactcgagaccccgggcttcatccacatccacacctcacacacctgttgtcagcatcgagccaacaccaacctgacaaggttcggagtgatgggggcggccaaggtgacactgggtccaggagctccctggggccctggcctaccactcactggcctcgctccccctgtccccgaatctcagccaccgtgtcactctgtgacctgtcccatggatcctgaaactgcatcttggccctgttgcctgggctgacaggagcattttttttttttccagtaaacaaaacctgaaagcaagcaacaaaacatacactttgtcagagaagaaaaaaatgccttaactataaaaagcggagaaatggaaacatatcactcaagggggatgctgtggaaacctggcttattcttctaaagccaccagcaaattgtgcctaagcgaaatattttttttaaggaaaataaaaacattagttacaagattttttttttcttaaggtagatgaaaattagcaaggatgctgcctttggtctctggtttttttaagctttttttgcatatgttttgtaagcaacaaatttttttgtataaaagtcccgtgtctctcgctatttctgctgctgttcctagactgagcattgcatttcttgatcaaccagatgattaaacgttgtattaaaaagaccccgtgtaaacctgagccccccccgtccccccccccggaagccactgcacacagacagacggggacaggcggcgggtcttttgtttttttgatgttgggggttctcttggttttgtcatgtggaaagtgatgcgtgggcgttccctgatgaaggcaccttggggcttccctgccgcatcctctcccctcaggaaggggactgacctgggcttgggggaagggacgtcagcaaggtggctctgaccctcccaggtgactctgccaagcagctgtggccccagcggtaccctacacaacgccctccccaggcccccctaagctgctctcccttggaacctgcacagctctctgaaatggggcattttgttgggaccagtgacccctggcatggggaccacaccctggagcccggtgctggggacctcctggacaccctgtccttcactccttgccccagggacccaggctcatgctctgaactctggctgagaggagtctgctcaggagccagcacaggacaccccccaccccaccccaccatgtccccattacaccagagggccatcgtgacgtagacaggatgccaggggcctgaccagcctccccaatgctggggagcatccctggcctggggccacacctgctgccctccctctgtgtggtccaagggcaagagtggctggagccgggggactgtgctggtctgagccccacgaaggccttgggctgtggctccgaccctgctgcagaaccagcagggtgtcccctcgggcccatctgtgtcccatgtcccagcacccaggcctctctccaggtctccttttctggtcttttgccatgagggtaaccagctcttcccagctggctgggactgtcttgggtttaaaactgcaagtctcctaccctgggatcccatccagttccacacgaactagggcagtggtcactgtggcacccaggtgtgggcctggctagctgggggccttcatgtgcccttcatgcccctccctgcattgaggccttgtggacccctgggctggctgtgttcatccccgctgcaggtcgggcgtctccccccgtgccactcctgagactccaccgttacccccaggagatcctggactgcctgactcccctccccagactggcttgggagcctgggccccatggtagatgcaagggaaacctcaaggccagctcaatgcctggtatctgcccccagtccaggccaggcggaggggaggggctgtccggctgcctctcccttctcggtggcttcccctgcgccctgggagtttgatctcttaagggaacttgcctctccctcttgttttgctcctgccctgcccctaggtctgggtggcagtggccccatagcctctggaactgtgcgttctgcatagaattcaaacgagattcacccagcgcgaggaggaagaaacagcagttcctgggaaccacaattatggggggtggggggtgtgatctgagtgcctcaagatggttttcaaaaaattttttttaaagaaaataattgtatacgtgtcaacacagctggctggatgattgggactttaaaacgaccctctttcaggtggattcagagacctgtcctgtatataacagcactgtagcaataaacgtgacattttataaag

SEQ ID NO: 97 - protein, 654 aa, Homo sapiens
MNQPQRMAPVGTDKELSDLLDFSMMFPLPVTNGKGRPASLAGAQFGGSGLEDRPSSGSWGSGDQSSSSFDPSRTFSEGTHFTESHSSLSSSTFLGPGLGGKSGERGAYASFGRDAGVGGLTQAGFLSGELALNSPGPLSPSGMKGTSQYYPSYSGSSRRRAADGSLDTQPKKVRKVPPGLPSSVYPPSSGEDYGRDATAYPSAKTPSSTYPAPFYVADGSLHPSAELWSPPGQAGFGPMLGGGSSPLPLPPGSGPVGSSGSSSTFGGLHQHERMGYQLHGAEVNGGLPSASSFSSAPGATYGGVSSHTPPVSGADSLLGSRGTTAGSSGDALGKALASIYSPDHSSNNFSSSPSTPVGSPQGLAGTSQWPRAGAPGALSPSYDGGLHGLQSKIEDHLDEAIHVLRSHAVGTAGDMHTLLPGHGALASGFTGPMSLGGRHAGLVGGSHPEDGLAGSTSLMHNHAALPSQPGTLPDLSRPPDSYSGLGRAGATAAASEIKREEKEDEENTSAADHSEEEKKELKAPRARTSPDEDEDDLLPPEQKAEREKERRVANNARERLRVRDINEAFKELGRMCQLHLNSEKPQTKLLILHQAVSVILNLEQQVRERNLNPKAACLKRREEEKVSGVVGDPQMVLSAPHPGLSEAHNPAGHM

SEQ ID NO: 98 - DNA, 7218 bp, Homo sapiens
  CDS (473)..(5248)
gccccgcatcgtgcccggccccgtcgcggagatcccggacgaccgtcgcgggttgatggtcgcattccagatgtaaacagcttcagaagcctgacggtcatatggtagaatcactgtggactgagacccacctttctagacctgaagcccaggaggaggaagaggaggctggttggtaccatgggcataatgctctgaatcctagtctctcacctagtatgtgagcagtccctgcagatggcccatttggagatcttgacaaagcctcttctgtttccaatggggtttttggcgcattctcacagacttagatgaaactgtgatggccaccgcagggggcaggtgctgacatcgtccccagccctgtggctgttcatccggacatcatttccaacctcaatatctaaatgccacagtgctcttggagcaagttgggctggggaccactgttgccttttaagaccataaaaccatgggaaacgcagaaagtcaacatgtagagcacgagttttatggagaaaagcatgccagcctggggcgcaagcacacttcccgctccctgcgcctctcgcacaagacgcggaggaccaggcacgcttcctcggggaaggtgatccacaggaactccgaagtgagcacccgatccagcagcacccccagcatcccccagtccctggctgaaaatggcctggagcccttctcccaagatggtaccctagaagacttcgggagccccatctgggtggaccgagtggacatgggcttgagacctgtgtcttacactgactcttctgtcactcccagcgtagacagcagcatcgtcctcacagcagcctctgtgcagagcatgccagacactgaggagagcaggctttacggggatgacgctacatatttggctgagggaggcaggaggcagcattcctatacatccaatgggcccactttcatggagacggcgagctttaagaagaaacgctccaaatctgcagacatctggcgggaggacagcctggaattctcactctctgatctgagccaagaacatttaacaagcaacgaagaaatcttgggttccgccgaagagaaggactgcgaggaggctcgggggatggaaacgcgggcgagtccgcggcagctcagcacctgtcagagagccaattccttgggtgacttgtatgctcagaaaaactctggagtgacagcaaacggggggccggggagcaaatttgcaggctactgtcggaatttggtgtctgatattcccaatcttgcaaaccataagatgccaccagctgctgctgaagagactcctccgtacagtaattataacacacttccctgtaggaaatctcactgtctctctgaaggtgccaccaacccacaaattagccatagcaacagcatgcaaggcagaagagctaaaacaactcaggatgttaatgcaggcgagggcagtgagtttgcagacagtgggattgaaggggccactaccgacacggacctcctgtccaggcgatctaatgccaccaactccagctactcacccaccacaggccgggcctttgtgggcagcgacagcggcagcagctccaccggggatgcggctcgtcagggggtgtacgagaacttccggcgggagctggagatgagcaccaccaacagcgagagcctggaggaggccggctcggcgcacagcgatgagcagagcagcggcaccctgagctctccgggccagtcggacatcctgctgaccgccgcacagggcacggtgcgcaaggccggcgccctggccgtcaagaacttcctggtgcacaagaagaacaagaaggtggagtcagccacccggaggaagtggaagcactactgggtgtccctgaaaggatgcacgctatttttctacgagagcgacggcaggtctgggatagaccacaacagcatccccaaacacgccgtctgggtggagaacagcattgtgcaggcggtgcctgagcaccccaagaaggactttgtcttctgcctcagcaattccctgggtgatgccttcctttttcagaccactagccagacggagcttgaaaactggatcaccgccatccactctgcctgcgccactgcggtcgcgaggcaccaccacaaggaagacacgctccgactcctgaaatcagagatcaaaaaactggaacagaagattgacatggatgaaaagatgaagaaaatgggtgaaatgcagctgtcttcagtcactgactcaaagaaaaagaaaacaatattagatcagatctttgtctgggagcaaaatctcgagcagttccaaatggacctgtttcgtttccgctgttatttagccagccttcagggtggggagctgccaaaccccaaaaggcttctcgcttttgcaagtcgaccaacgaaagtggccatgggccgccttggaatcttttcggtatcatcgtttcatgccctggtggcagcacgcactggtgaaactggagtgagaagacgtactcaggccatgtccagatccgcgagcaagcgaaggagcaggttttcttctctgtggggtctggatactacctccaaaaagaagcagggacggccaagcatcaatcaggtgtttggagagggaaccgaagctgtaaagaaatctttagagggaatatttgatgacattgttccagatggcaagagggagaaagaagtggtcttacctaacgttcaccagcacaaccctgactgcgacatttgggtccacgagtatttcactccatcctggttctgtctgcccaataatcagcctgccctgacggtcgtccggccaggcgacactgcacgggacaccctggagctgatttgcaagacacatcaactggatcattctgctcattacctgcgcctgaaatttctaatagaaaacaaaatgcagctctatgttccacagcccgaggaagacatctatgagctgctgtacaaagaaattgaaatctgtccaaaagtcactcagagcatccacattgagaagtcagatacagctgctgatacttacgggttttcactttcttctgtggaagaagatggtattcgaaggctgtacgtgaatagtgtgaaggaaaccggtttagcttccaagaaaggcctgaaagcaggagatgagattcttgagatcaataatcgtgctgctgacgccctgaactcttctatgctcaaagatttcctctcacagccctcgctgggcctcctggtgaggacctaccccgagctggaggaaggagtggagctgctggaaagcccgccccaccgagtggacggccctgccgaccttggcgagagccccctcgcctttctcaccagcaacccagggcacagcctttgcagcgagcagggcagcagtgctgagaccgctccagaggagaccgaggggccagacttggaatcctcagatgagactgatcacagcagcaagagtacagaacaggtggccgcattttgccgcagtttgcatgagatgaacccctctgaccagagcccatctcctcaggactccacggggcctcagctggcgaccatgagacaactctcggatgcagataagctgcgcaaggtgatctgcgagctcctggagacggagcgcacctacgtgaaggatttaaactgtcttatggagagatacctaaagcctcttcaaaaagaaacttttctcacccaggatgagcttgacgtgctttttggaaatttaacggaaatggtagagtttcaagtagaattccttaaaactctagaagatggagtgagactggtacctgatttggaaaagcttgagaaggttgatcaatttaagaaagtgctgttctctctggggggatcattcctgtattatgctgaccgcttcaagctctacagtgccttctgcgccagccacacaaaagttcccaaggtcctggtgaaagccaagacagacacggctttcaaggcattcttggatgcccagaacccgaagcagcagcactcatccacgctggagtcgtacctcatcaagcccatccagaggatcctcaagtacccacttctgctcagggagctgttcgccctgaccgatgcggagagcgaggagcactaccacctggacgtggccatcaagaccatgaacaaggttgccagtcacatcaatgagatgcagaaaatccatgaagagtttggggctgtgtttgaccagctgattgctgaacagactggtgagaaaaaagaggttgcagatctgagcatgggagacctgcttttgcacactaccgtgatctggctgaacccgccggcctcgctgggcaagtggaaaaaggaaccagagttggcagcattcgtcttcaaaactgctgtggtccttgtgtataaagatggttccaaacagaagaagaaacttgtaggatctcacaggctttccatttatgaggactgggaccccttcagatttcgacacatgatccccacggaagcgctgcaggttcgagctttggcgagtgcagatgcagaggcaaatgccgtgtgtgaaattgtccatgtaaaatccgagtctgaagggaggccggagagggtctttcacttgtgctgcagctccccagagagccgaaaggatttcctaaaggctgtgcattcaatcctgcgtgataagcacagaagacagctcctcaaaaccgagagccttccctcatcccagcaatatgtcccttttggaggcaaaagattgtgtgcactgaagggggccaggccggccatgagcagggcagtgtctgccccaagcaagtctcttgggaggaggaggcggcggctggctcgaaacaggtttaccattgattctgatgccgtctccgcaagcagcccggagaaagagtcccagcagccccccggtggtggggacactgaccgatgggtagaggagcagtttgatcttgctcagtatgaggagcaagatgacatcaaggagacagacatcctcagtgacgatgatgagttctgtgagtccgtgaagggtgcctcagtggacagagacctgcaggagcggcttcaggccacctccatcagtcagcgggaaagaggccggaaaaccctggatagtcacgcgtcccgcatggcacagctcaagaagcaagctgccctgtcggggatcaatggaggcctggagagcgcaagcgaggaagtcatttgggttaggcgtgaagactttgccccctccaggaaactgaacactgagatctgactgcgtcacctgccccgtagagaatgtgtgtagatacttcctgccctaactctgcccaccctcctgtaccgtcgacaagaatgtccccttaggtcgcgctcttgcacacacggttttggcagctgacttggttctgaagccatgtagccacccaactttgtcattttcaacaacatcagaaagaattgatcagaatcccaaataagcttgagtcctatcttctgtatattactaagggcttttatttattctcaataaatcagggcctgaacaattaaaagaaaaaagattctatagcactggaaagcaaatcaccccaggagttaacggatgtacaacagattaatttaagggatagtagcacacacacgatccttctatctgaaatcagtctcctagctggggaaacctctttcacacacaaaatgaaatgtgtacagcttgccgtgttctgactgtacccttccctcttccatgtctgagaatctccgtgtattttaagaatgtgtgaggagagggtggcgattcatgtttcaatgagcctctttttttttttccttcctgttttggtctatggctggtcttactctgtgtccatgttcggaagctctagttttgcatagaattatagagatgccaaactctttgaaaagagatccaaatttatcgcttgagagaaagaaaagaaacactattttttgtattttacctgagatacaggggcacaaatagatgagaattttacagtgttagtgtatgtatccctgagcctaaaaaatgaggatataaccttttacagagagagtgaggcgtggtggttttatatttatatatgaaaggccagcaagctcatgcgaaggatatacttttcttccaaaaagcggattttttttttttaatgtttgaatctatatttgagatgggagtttggttggattaaacatgacaccccggtgggcggtgtgtgtgtctgttgcacatggcagggaggggagcctccttctcatggggttgccatggtgatcattggtttttccatcaaaattgcatcttcatccatagattaccttccccttccctgacagtccataaccaaacctttaaacagaacaacctctttaaaaacttctcttgtgtttaacactttcttcatgccaacgaaacagggtaaacatgctcaaaacattaacagtctaaacagatatccaaatactaagaagaaaaacaagttatagcactttcaattttttttttttttttaaaaaaaggtttatagctttttcttttcccatgtcacaatgtccacttcctaagaagggtttaaaatactatgaaaactttctttttggggaaaatatctatttggtgtttgacacatcagtaggtactttaaagacctgaattttatagtagctttaggagttatattttataaaaatcagttatgactttatatttccagacaatagagagttcagtacatcatgctcttgtgcctctgcctgcttttcctgcgttcccaccctgtattccccccgcctttcgggtttccagggcttcgagcttgatcttttgaaagttttattctattaaatttttgctatatcttctggttttctgaaaaagctttagaatggtttctataccctttgtatcactgcatttttccatatcatctccggttcgatcgcgtccagatggaaaacggaagcagaggcttctaatcgtcgcatttactggctccagtgcaacacatccatctgaaaacactcggaagtctggtgcttggagagggtgccattgtctcttgtacataaggtcatgacgtgtctatgtcaaaagttcttatatatttcttttataagctgaaagaaggtctatttttatgtttttaggtctatgaatggaacgttgtaaatgcttgtcaaacaataaaaataacgaaaagtgaaaaaaaaaaaaaaaaaaaa

SEQ ID NO: 99 - protein, 1591 aa, Homo sapiens
MGNAESQHVEHEFYGEKHASLGRKHTSRSLRLSHKTRRTRHASSGKVIHRNSEVSTRSSSTPSIPQSLAENGLEPFSQDGTLEDFGSPIWVDRVDMGLRPVSYTDSSVTPSVDSSIVLTAASVQSMPDTEESRLYGDDATYLAEGGRRQHSYTSNGPTFMETASFKKKRSKSADIWREDSLEFSLSDLSQEHLTSNEEILGSAEEKDCEEARGMETRASPRQLSTCQRANSLGDLYAQKNSGVTANGGPGSKFAGYCRNLVSDIPNLANHKMPPAAAEETPPYSNYNTLPCRKSHCLSEGATNPQISHSNSMQGRRAKTTQDVNAGEGSEFADSGIEGATTDTDLLSRRSNATNSSYSPTTGRAFVGSDSGSSSTGDAARQGVYENFRRELEMSTTNSESLEEAGSAHSDEQSSGTLSSPGQSDILLTAAQGTVRKAGALAVKNFLVHKKNKKVESATRRKWKHYWVSLKGCTLFFYESDGRSGIDHNSIPKHAVWVENSIVQAVPEHPKKDFVFCLSNSLGDAFLFQTTSQTELENWITAIHSACATAVARHHHKEDTLRLLKSEIKKLEQKIDMDEKMKKMGEMQLSSVTDSKKKKTILDQIFVWEQNLEQFQMDLFRFRCYLASLQGGELPNPKRLLAFASRPTKVAMGRLGIFSVSSFHALVAARTGETGVRRRTQAMSRSASKRRSRFSSLWGLDTTSKKKQGRPSINQVFGEGTEAVKKSLEGIFDDIVPDGKREKEVVLPNVHQHNPDCDIWVHEYFTPSWFCLPNNQPALTVVRPGDTARDTLELICKTHQLDHSAHYLRLKFLIENKMQLYVPQPEEDIYELLYKEIEICPKVTQSIHIEKSDTAADTYGFSLSSVEEDGIRRLYVNSVKETGLASKKGLKAGDEILEINNRAADALNSSMLKDFLSQPSLGLLVRTYPELEEGVELLESPPHRVDGPADLGESPLAFLTSNPGHSLCSEQGSSAETAPEETEGPDLESSDETDHSSKSTEQVAAFCRSLHEMNPSDQSPSPQDSTGPQLATMRQLSDADKLRKVICELLETERTYVKDLNCLMERYLKPLQKETFLTQDELDVLFGNLTEMVEFQVEFLKTLEDGVRLVPDLEKLEKVDQFKKVLFSLGGSFLYYADRFKLYSAFCASHTKVPKVLVKAKTDTAFKAFLDAQNPKQQHSSTLESYLIKPIQRILKYPLLLRELFALTDAESEEHYHLDVAIKTMNKVASHINEMQKIHEEFGAVFDQLIAEQTGEKKEVADLSMGDLLLHTTVIWLNPPASLGKWKKEPELAAFVFKTAVVLVYKDGSKQKKKLVGSHRLSIYEDWDPFRFRHMIPTEALQVRALASADAEANAVCEIVHVKSESEGRPERVFHLCCSSPESRKDFLKAVHSILRDKHRRQLLKTESLPSSQQYVPFGGKRLCALKGARPAMSRAVSAPSKSLGRRRRRLARNRFTIDSDAVSASSPEKESQQPPGGGDTDRWVEEQFDLAQYEEQDDIKETDILSDDDEFCESVKGASVDRDLQERLQATSISQRERGRKTLDSHASRMAQLKKQAALSGINGGLESASEEVIWVRREDFAPSRKLNTEI

SEQ ID NO: 100 - DNA, 8091 bp, Homo sapiens
  CDS (79)..(7044)
acgcggcgcggaggctggcccgggacgcgcccggagcccagggaaggagggaggaggggagggtcgcggccggccgccatggggccgggggcccgtggccgccgccgccgccgtcgcccgatgtcgccgccaccgccaccgccacccgtgcgggcgctgcccctgctgctgctgctagcggggccgggggctgcagcccccccttgcctggacggaagcccgtgtgcaaatggaggtcgttgcacccagctgccctcccgggaggctgcctgcctgtgcccgcctggctgggtgggtgagcggtgtcagctggaggacccctgtcactcaggcccctgtgctggccgtggtgtctgccagagttcagtggtggctggcaccgcccgattctcatgccggtgcccccgtggcttccgaggccctgactgctccctgccagatccctgcctcagcagcccttgtgcccacggtgcccgctgctcagtggggcccgatggacgcttcctctgctcctgcccacctggctaccagggccgcagctgccgaagcgacgtggatgagtgccgggtgggtgagccctgccgccatggtggcacctgcctcaacacacctggctccttccgctgccagtgtccagctggctacacagggccactatgtgagaaccccgcggtgccctgtgcgccctcaccatgccgtaacgggggcacctgcaggcagagtggcgacctcacttacgactgtgcctgtcttcctgggtttgagggtcagaattgtgaagtgaacgtggacgactgtccaggacaccgatgtctcaatggggggacatgcgtggatggcgtcaacacctataactgccagtgccctcctgagtggacaggccagttctgcacggaggacgtggatgagtgtcagctgcagcccaacgcctgccacaatgggggtacctgcttcaacacgctgggtggccacagctgcgtgtgtgtcaatggctggacaggtgagagctgcagtcagaatatcgatgactgtgccacagccgtgtgcttccatggggccacctgccatgaccgcgtggcttctttctactgtgcctgccccatgggcaagactggcctcctgtgtcacctggatgacgcctgtgtcagcaacccctgccacgaggatgctatctgtgacacaaatccggtgaacggccgggccatttgcacctgtcctcccggcttcacgggtggggcatgtgaccaggatgtggacgagtgctctatcggcgccaacccctgcgagcacttgggcaggtgcgtgaacacgcagggctccttcctgtgccagtgcggtcgtggctacactggacctcgctgtgagaccgatgtcaacgagtgtctgtcggggccctgccgaaaccaggccacgtgcctcgaccgcataggccagttcacctgtatctgtatggcaggcttcacaggaacctattgcgaggtggacattgacgagtgtcagagtagcccctgtgtcaacggtggggtctgcaaggaccgagtcaatggcttcagctgcacctgcccctcgggcttcagcggctccacgtgtcagctggacgtggacgaatgcgccagcacgccctgcaggaatggcgccaaatgcgtggaccagcccgatggctacgagtgccgctgtgccgagggctttgagggcacgctgtgtgatcgcaacgtggacgactgctcccctgacccatgccaccatggtcgctgcgtggatggcatcgccagcttctcatgtgcctgtgctcctggctacacgggcacacgctgcgagagccaggtggacgaatgccgcagccagccctgccgccatggcggcaaatgcctagacctggtggacaagtacctctgccgctgcccttctgggaccacaggtgtgaactgcgaagtgaacattgacgactgtgccagcaacccctgcacctttggagtctgccgtgatggcatcaaccgctacgactgtgtctgccaacctggcttcacagggcccctttgtaacgtggagatcaatgagtgtgcttccagcccatgcggcgagggaggttcctgtgtggatggggaaaatggcttccgctgcctctgcccgcctggctccttgcccccactctgcctccccccgagccatccctgtgcccatgagccctgcagtcacggcatctgctatgatgcacctggcgggttccgctgtgtgtgtgagcctggctggagtggcccccgctgcagccagagcctggcccgagacgcctgtgagtcccagccgtgcagggccggtgggacatgcagcagcgatggaatgggtttccactgcacctgcccgcctggtgtccagggacgtcagtgtgaactcctctccccctgcaccccgaacccctgtgagcatgggggccgctgcgagtctgcccctggccagctgcctgtctgctcctgcccccagggctggcaaggcccacgatgccagcaggatgtggacgagtgtgctggccccgcaccctgtggccctcatggtatctgcaccaacctggcagggagtttcagctgcacctgccatggagggtacactggcccttcctgtgatcaggacatcaatgactgtgaccccaacccatgcctgaacggtggctcgtgccaagacggcgtgggctccttttcctgctcctgcctccctggtttcgccggcccacgatgcgcccgcgatgtggatgagtgcctgagcaacccctgcggcccgggcacctgtaccgaccacgtggcctccttcacctgcacctgcccgccgggctacggaggcttccactgcgaacaggacctgcccgactgcagccccagctcctgcttcaatggcgggacctgtgtggacggcgtgaactcgttcagctgcctgtgccgtcccggctacacaggagcccactgccaacatgaggcagacccctgcctctcgcggccctgcctacacgggggcgtctgcagcgccgcccaccctggcttccgctgcacctgcctcgagagcttcacgggcccgcagtgccagacgctggtggattggtgcagccgccagccttgtcaaaacgggggtcgctgcgtccagactggggcctattgcctttgtccccctggatggagcggacgcctctgtgacatccgaagcttgccctgcagggaggccgcagcccagatcggggtgcggctggagcagctgtgtcaggcgggtgggcagtgtgtggatgaagacagctcccactactgcgtgtgcccagagggccgtactggtagccactgtgagcaggaggtggacccctgcttggcccagccctgccagcatggggggacctgccgtggctatatggggggctacatgtgtgagtgtcttcctggctacaatggtgataactgtgaggacgacgtggacgagtgtgcctcccagccctgccagcacgggggttcatgcattgacctcgtggcccgctatctctgctcctgtcccccaggaacgctgggggtgctctgcgagattaatgaggatgactgcggcccaggcccaccgctggactcagggccccggtgcctacacaatggcacctgcgtggacctggtgggtggtttccgctgcacctgtcccccaggatacactggtttgcgctgcgaggcagacatcaatgagtgtcgctcaggtgcctgccacgcggcacacacccgggactgcctgcaggacccaggcggaggtttccgttgcctttgtcatgctggcttctcaggtcctcgctgtcagactgtcctgtctccctgcgagtcccagccatgccagcatggaggccagtgccgtcctagcccgggtcctgggggtgggctgaccttcacctgtcactgtgcccagccgttctggggtccgcgttgcgagcgggtggcgcgctcctgccgggagctgcagtgcccggtgggcgtcccatgccagcagacgccccgcgggccgcgctgcgcctgccccccagggttgtcgggaccctcctgccgcagcttcccggggtcgccgccgggggccagcaacgccagctgcgcggccgccccctgtctccacgggggctcctgccgccccgcgccgctcgcgcccttcttccgctgcgcttgcgcgcagggctggaccgggccgcgctgcgaggcgcccgccgcggcacccgaggtctcggaggagccgcggtgcccgcgcgccgcctgccaggccaagcgcggggaccagcgctgcgaccgcgagtgcaacagcccaggctgcggctgggacggcggcgactgctcgctgagcgtgggcgacccctggcggcaatgcgaggcgctgcagtgctggcgcctcttcaacaacagccgctgcgaccccgcctgcagctcgcccgcctgcctctacgacaacttcgactgccacgccggtggccgcgagcgcacttgcaacccggtgtacgagaagtactgcgccgaccactttgccgacggccgctgcgaccagggctgcaacacggaggagtgcggctgggatgggctggattgtgccagcgaggtgccggccctgctggcccgcggcgtgctggtgctcacagtgctgctgccgccggaggagctactgcgttccagcgccgactttctgcagcggctcagcgccatcctgcgcacctcgctgcgcttccgcctggacgcgcacggccaggccatggtcttcccttaccaccggcctagtcctggctccgaaccccgggcccgtcgggagctggcccccgaggtgatcggctcggtagtaatgctggagattgacaaccggctctgcctgcagtcgcctgagaatgatcactgcttccccgatgcccagagcgccgctgactacctgggagcgttgtcagcggtggagcgcctggacttcccgtacccactgcgggacgtgcggggggagccgctggagcctccagaacccagcgtcccgctgctgccactgctagtggcgggcgctgtcttgctgctggtcattctcgtcctgggtgtcatggtggcccggcgcaagcgcgagcacagcaccctctggttccctgagggcttctcactgcacaaggacgtggcctctggtcacaagggccggcgggaacccgtgggccaggacgcgctgggcatgaagaacatggccaagggtgagagcctgatgggggaggtggccacagactggatggacacagagtgcccagaggccaagcggctaaaggtagaggagccaggcatgggggctgaggaggctgtggattgccgtcagtggactcaacaccatctggttgctgctgacatccgcgtggcaccagccatggcactgacaccaccacagggcgacgcagatgctgatggcatggatgtcaatgtgcgtggcccagatggcttcaccccgctaatgctggcttccttctgtgggggggctctggagccaatgccaactgaagaggatgaggcagatgacacatcagctagcatcatctccgacctgatctgccagggggctcagcttggggcacggactgaccgtactggcgagactgctttgcacctggctgcccgttatgcccgtgctgatgcagccaagcggctgctggatgctggggcagacaccaatgcccaggaccactcaggccgcactcccctgcacacagctgtcacagccgatgcccagggtgtcttccagattctcatccgaaaccgctctacagacttggatgcccgcatggcagatggctcaacggcactgatcctggcggcccgcctggcagtagagggcatggtggaagagctcatcgccagccatgctgatgtcaatgctgtggatgagcttgggaaatcagccttacactgggctgcggctgtgaacaacgtggaagccactttggccctgctcaaaaatggagccaataaggacatgcaggatagcaaggaggagacccccctattcctggccgcccgcgagggcagctatgaggctgccaagctgctgttggaccactttgccaaccgtgagatcaccgaccacctggacaggctgccgcgggacgtagcccaggagagactgcaccaggacatcgtgcgcttgctggatcaacccagtgggccccgcagcccccccggtccccacggcctggggcctctgctctgtcctccaggggccttcctccctggcctcaaagcggcacagtcggggtccaagaagagcaggaggccccccgggaaggcggggctggggccgcaggggccccgggggcggggcaagaagctgacgctggcctgcccgggccccctggctgacagctcggtcacgctgtcgcccgtggactcgctggactccccgcggcctttcggtgggccccctgcttcccctggtggcttcccccttgaggggccctatgcagctgccactgccactgcagtgtctctggcacagcttggtggcccaggccgggcaggtctagggcgccagccccctggaggatgtgtactcagcctgggcctgctgaaccctgtggctgtgcccctcgattgggcccggctgcccccacctgcccctccaggcccctcgttcctgctgccactggcgccgggaccccagctgctcaacccagggacccccgtctccccgcaggagcggcccccgccttacctggcagtcccaggacatggcgaggagtacccggtggctggggcacacagcagccccccaaaggcccgcttcctgcgggttcccagtgagcacccttacctgaccccatcccccgaatcccctgagcactgggccagcccctcacctccctccctctcagactggtccgaatccacgcctagcccagccactgccactggggccatggccaccaccactggggcactgcctgcccagccacttcccttgtctgttcccagctcccttgctcaggcccagacccagctggggccccagccggaagttacccccaagaggcaagtgttggcctgagacgctcgtcagttcttagatcttgggggcctaaagagacccccgtcctgcctcctttctttctctgtctcttccttccttttagtctttttcatcctcttctctttccaccaaccctcctgcatccttgccttgcagcgtgaccgagataggtcatcagcccagggcttcagtcttcctttatttataatgggtgggggctaccacccaccctctcagtcttgtgaagagtctgggacctccttcttccccacttctctcttccctcattcctttctctctccttctggcctctcatttccttacactctgacatgaatgaattattattatttttctttttctttttttttttacattttgtatagaaacaaattcatttaaacaaacttattattattattttttacaaaatatatatatggagatgctccctccccctgtgaaccccccagtgcccccgtggggctgagtctgtgggcccattcggccaagctggattctgtgtacctagtacacaggcatgactgggatcccgtgtaccgagtacacgacccaggtatgtaccaagtaggcacccttgggcgcacccactggggccaggggtcgggggagtgttgggagcctcctccccaccccacctccctcacttcactgcattccagattggacatgttccatagccttgctggggaagggcccactgccaactccctctgccccagccccacccttggccatctccctttgggaactagggggctgctggtgggaaatgggagccagggcagatgtatgcattcctttatgtccctgtaaatgtgggactacaagaagaggagctgcctgagtggtactttctcttcctggtaatcctctggcccagccttatggcagaatagaggtatttttaggctatttttgtaatatggcttctggtcaaaatccctgtgtagctgaattcccaagccctgcattgtacagccccccactcccctcaccacctaataaaggaatagttaacactcaaaaaaaaaaaaaaaaaaa

SEQ ID NO: 101 - protein, 2321 aa, Homo sapiens
MGPGARGRRRRRRPMSPPPPPPPVRALPLLLLLAGPGAAAPPCLDGSPCANGGRCTQLPSREAACLCPPGWVGERCQLEDPCHSGPCAGRGVCQSSVVAGTARFSCRCPRGFRGPDCSLPDPCLSSPCAHGARCSVGPDGRFLCSCPPGYQGRSCRSDVDECRVGEPCRHGGTCLNTPGSFRCQCPAGYTGPLCENPAVPCAPSPCRNGGTCRQSGDLTYDCACLPGFEGQNCEVNVDDCPGHRCLNGGTCVDGVNTYNCQCPPEWTGQFCTEDVDECQLQPNACHNGGTCFNTLGGHSCVCVNGWTGESCSQNIDDCATAVCFHGATCHDRVASFYCACPMGKTGLLCHLDDACVSNPCHEDAICDTNPVNGRAICTCPPGFTGGACDQDVDECSIGANPCEHLGRCVNTQGSFLCQCGRGYTGPRCETDVNECLSGPCRNQATCLDRIGQFTCICMAGFTGTYCEVDIDECQSSPCVNGGVCKDRVNGFSCTCPSGFSGSTCQLDVDECASTPCRNGAKCVDQPDGYECRCAEGFEGTLCDRNVDDCSPDPCHHGRCVDGIASFSCACAPGYTGTRCESQVDECRSQPCRHGGKCLDLVDKYLCRCPSGTTGVNCEVNIDDCASNPCTFGVCRDGINRYDCVCQPGFTGPLCNVEINECASSPCGEGGSCVDGENGFRCLCPPGSLPPLCLPPSHPCAHEPCSHGICYDAPGGFRCVCEPGWSGPRCSQSLARDACESQPCRAGGTCSSDGMGFHCTCPPGVQGRQCELLSPCTPNPCEHGGRCESAPGQLPVCSCPQGWQGPRCQQDVDECAGPAPCGPHGICTNLAGSFSCTCHGGYTGPSCDQDINDCDPNPCLNGGSCQDGVGSFSCSCLPGFAGPRCARDVDECLSNPCGPGTCTDHVASFTCTCPPGYGGFHCEQDLPDCSPSSCFNGGTCVDGVNSFSCLCRPGYTGAHCQHEADPCLSRPCLHGGVCSAAHPGFRCTCLESFTGPQCQTLVDWCSRQPCQNGGRCVQTGAYCLCPPGWSGRLCDIRSLPCREAAAQIGVRLEQLCQAGGQCVDEDSSHYCVCPEGRTGSHCEQEVDPCLAQPCQHGGTCRGYMGGYMCECLPGYNGDNCEDDVDECASQPCQHGGSCIDLVARYLCSCPPGTLGVLCEINEDDCGPGPPLDSGPRCLHNGTCVDLVGGFRCTCPPGYTGLRCEADINECRSGACHAAHTRDCLQDPGGGFRCLCHAGFSGPRCQTVLSPCESQPCQHGGQCRPSPGPGGGLTFTCHCAQPFWGPRCERVARSCRELQCPVGVPCQQTPRGPRCACPPGLSGPSCRSFPGSPPGASNASCAAAPCLHGGSCRPAPLAPFFRCACAQGWTGPRCEAPAAAPEVSEEPRCPRAACQAKRGDQRCDRECNSPGCGWDGGDCSLSVGDPWRQCEALQCWRLFNNSRCDPACSSPACLYDNFDCHAGGRERTCNPVYEKYCADHFADGRCDQGCNTEECGWDGLDCASEVPALLARGVLVLTVLLPPEELLRSSADFLQRLSAILRTSLRFRLDAHGQAMVFPYHRPSPGSEPRARRELAPEVIGSVVMLEIDNRLCLQSPENDHCFPDAQSAADYLGALSAVERLDFPYPLRDVRGEPLEPPEPSVPLLPLLVAGAVLLLVILVLGVMVARRKREHSTLWFPEGFSLHKDVASGHKGRREPVGQDALGMKNMAKGESLMGEVATDWMDTECPEAKRLKVEEPGMGAEEAVDCRQWTQHHLVAADIRVAPAMALTPPQGDADADGMDVNVRGPDGFTPLMLASFCGGALEPMPTEEDEADDTSASIISDLICQGAQLGARTDRTGETALHLAARYARADAAKRLLDAGADTNAQDHSGRTPLHTAVTADAQGVFQILIRNRSTDLDARMADGSTALILAARLAVEGMVEELIASHADVNAVDELGKSALHWAAAVNNVEATLALLKNGANKDMQDSKEETPLFLAAREGSYEAAKLLLDHFANREITDHLDRLPRDVAQERLHQDIVRLLDQPSGPRSPPGPHGLGPLLCPPGAFLPGLKAAQSGSKKSRRPPGKAGLGPQGPRGRGKKLTLACPGPLADSSVTLSPVDSLDSPRPFGGPPASPGGFPLEGPYAAATATAVSLAQLGGPGRAGLGRQPPGGCVLSLGLLNPVAVPLDWARLPPPAPPGPSFLLPLAPGPQLLNPGTPVSPQERPPPYLAVPGHGEEYPVAGAHSSPPKARFLRVPSEHPYLTPSPESPEHWASPSPPSLSDWSESTPSPATATGAMATTTGALPAQPLPLSVPSSLAQAQTQLGPQPEVTPKRQVLA

SEQ ID NO: 102 - DNA, 1669 bp, Homo sapiens
  CDS (170)..(871)
ctccctcagcaaggacagcagaggaccagctaagagggagagaagcaactacagaccccccctgaaaacaaccctcagacgccacatcccctgacaagctgccaggcaggttctcttcctctcacatactgacccacggctccaccctctctcccctggaaaggacaccatgagcactgaaagcatgatccgggacgtggagctggccgaggaggcgctccccaagaagacaggggggccccagggctccaggcggtgcttgttcctcagcctcttctccttcctgatcgtggcaggcgccaccacgctcttctgcctgctgcactttggagtgatcggcccccagagggaagagttccccagggacctctctctaatcagccctctggcccaggcagtcagatcatcttctcgaaccccgagtgacaagcctgtagcccatgttgtagcaaaccctcaagctgaggggcagctccagtggctgaaccgccgggccaatgccctcctggccaatggcgtggagctgagagataaccagctggtggtgccatcagagggcctgtacctcatctactcccaggtcctcttcaagggccaaggctgcccctccacccatgtgctcctcacccacaccatcagccgcatcgccgtctcctaccagaccaaggtcaacctcctctctgccatcaagagcccctgccagagggagaccccagagggggctgaggccaagccctggtatgagcccatctatctgggaggggtcttccagctggagaagggtgaccgactcagcgctgagatcaatcggcccgactatctcgactttgccgagtctgggcaggtctactttgggatcattgccctgtgaggaggacgaacatccaaccttcccaaacgcctcccctgccccaatccctttattaccccctccttcagacaccctcaacctcttctggctcaaaaagagaattgggggcttagggtcggaacccaagcttagaactttaagcaacaagaccaccacttcgaaacctgggattcaggaatgtgtggcctgcacagtgaagtgctggcaaccactaagaattcaaactggggcctccagaactcactggggcctacagctttgatccctgacatctggaatctggagaccagggagcctttggttctggccagaatgctgcaggacttgagaagacctcacctagaaattgacacaagtggaccttaggccttcctctctccagatgtttccagacttccttgagacacggagcccagccctccccatggagccagctccctctatttatgtttgcacttgtgattatttattatttatttattatttatttatttacagatgaatgtatttatttgggagaccggggtatcctgggggacccaatgtaggagctgccttggctcagacatgttttccgtgaaaacggagctgaacaataggctgttcccatgtagccccctggcctctgtgccttcttttgattatgttttttaaaatatttatctgattaagttgtctaaacaatgctgatttggtgaccaactgtcactcattgctgagcctctgctccccaggggagttgtgtctgtaatcgccctactattcagtggcgagaaataaagtttgcttagaaaagaa

SEQ ID NO: 103 - protein, 233 aa, Homo sapiens
MSTESMIRDVELAEEALPKKTGGPQGSRRCLFLSLFSFLIVAGATTLFCLLHFGVIGPQREEFPRDLSLISPLAQAVRSSSRTPSDKPVAHVVANPQAEGQLQWLNRRANALLANGVELRDNQLVVPSEGLYLIYSQVLFKGQGCPSTHVLLTHTISRIAVSYQTKVNLLSAIKSPCQRETPEGAEAKPWYEPIYLGGVFQLEKGDRLSAEINRPDYLDFAESGQVYFGIIAL

SEQ ID NO: 104 - DNA, 2486 bp, Homo sapiens
  CDS (124)..(1437)
ccgggactttgcaggcagcggcggccgggggcggagcgggatcgagccctcgccgaggcctgccgccatgggcccgcgccgccgccgccgcctgtcacccgggccgcgcgggccgtgagcgtcatggccttggccggggcccctgcgggcggcccatgcgcgccggcgctggaggccctgctcggggccggcgcgctgcggctgctcgactcctcgcagatcgtcatcatctccgccgcgcaggacgccagcgccccgccggctcccaccggccccgcggcgcccgccgccggcccctgcgaccctgacctgctgctcttcgccacaccgcaggcgccccggcccacacccagtgcgccgcggcccgcgctcggccgcccgccggtgaagcggaggctggacctggaaactgaccatcagtacctggccgagagcagtgggccagctcggggcagaggccgccatccaggaaaaggtgtgaaatccccgggggagaagtcacgctatgagacctcactgaatctgaccaccaagcgcttcctggagctgctgagccactcggctgacggtgtcgtcgacctgaactgggctgccgaggtgctgaaggtgcagaagcggcgcatctatgacatcaccaacgtccttgagggcatccagctcattgccaagaagtccaagaaccacatccagtggctgggcagccacaccacagtgggcgtcggcggacggcttgaggggttgacccaggacctccgacagctgcaggagagcgagcagcagctggaccacctgatgaatatctgtactacgcagctgcgcctgctctccgaggacactgacagccagcgcctggcctacgtgacgtgtcaggaccttcgtagcattgcagaccctgcagagcagatggttatggtgatcaaagcccctcctgagacccagctccaagccgtggactcttcggagaactttcagatctcccttaagagcaaacaaggcccgatcgatgttttcctgtgccctgaggagaccgtaggtgggatcagccctgggaagaccccatcccaggaggtcacttctgaggaggagaacagggccactgactctgccaccatagtgtcaccaccaccatcatctcccccctcatccctcaccacagatcccagccagtctctactcagcctggagcaagaaccgctgttgtcccggatgggcagcctgcgggctcccgtggacgaggaccgcctgtccccgctggtggcggccgactcgctcctggagcatgtgcgggaggacttctccggcctcctccctgaggagttcatcagcctttccccaccccacgaggccctcgactaccacttcggcctcgaggagggcgagggcatcagagacctcttcgactgtgactttggggacctcacccccctggatttctgacagggcttggagggaccagggtttccagagtagctcaccttgtctctgcagccctggagccccctgtccctggccgtcctcccagcctgtttggaaacatttaatttatacccctctcctctgtctccagaagcttctagctctggggtctggctaccgctaggaggctgagcaagccaggaagggaaggagtctgtgtggtgtgtatgtgcatgcagcctacacccacacgtgtgtaccgggggtgaatgtgtgtgagcatgtgtgtgtgcatgtaccggggaatgaaggtgaacatacacctctgtgtgtgcactgcagacacgccccagtgtgtccacatgtgtgtgcatgagtccatctctgcgcgtgggggggctctaactgcactttcggcccttttgctcgtggggtcccacaaggcccagggcagtgcctgctcccagaatctggtgctctgaccaggccaggtggggaggctttggctggctgggcgtgtaggacggtgagagcacttctgtcttaaaggttttttctgattgaagctttaatggagcgttatttatttatcgaggcctctttggtgagcctggggaatcagcaaaaggggaggaggggtgtggggttgataccccaactccctctacccttgagcaagggcaggggtccctgagctgttcttctgccccatactgaaggaactgaggcctgggtgatttatttattgggaaagtgagggagggagacagactgactgacagccatgggtggtcagatggtggggtgggccctctccagggggccagttcagggcccagctgccccccaggatggatatgagatgggagaggtgagtgggggaccttcactgatgtgggcaggaggggtggtgaaggcctcccccagcccagaccctgtggtccctcctgcagtgtctgaagcgcctgcctccccactgctctgccccaccctccaatctgcactttgatttgcttcctaacagctctgttccctcctgctttggttttaataaatattttgatgacgtt

SEQ ID NO: 105 - protein, 437 aa, Homo sapiens
MALAGAPAGGPCAPALEALLGAGALRLLDSSQIVIISAAQDASAPPAPTGPAAPAAGPCDPDLLLFATPQAPRPTPSAPRPALGRPPVKRRLDLETDHQYLAESSGPARGRGRHPGKGVKSPGEKSRYETSLNLTTKRFLELLSHSADGVVDLNWAAEVLKVQKRRIYDITNVLEGIQLIAKKSKNHIQWLGSHTTVGVGGRLEGLTQDLRQLQESEQQLDHLMNICTTQLRLLSEDTDSQRLAYVTCQDLRSIADPAEQMVMVIKAPPETQLQAVDSSENFQISLKSKQGPIDVFLCPEETVGGISPGKTPSQEVTSEEENRATDSATIVSPPPSSPPSSLTTDPSQSLLSLEQEPLLSRMGSLRAPVDEDRLSPLVAADSLLEHVREDFSGLLPEEFISLSPPHEALDYHFGLEEGEGIRDLFDCDFGDLTPLDF

SEQ ID NO: 106 - DNA, 913 bp, Homo sapiens
  CDS (151)..(732)
ccagagaggggcaggctggtcccctgacaggttgaagcaagtagacgcccaggagccccgggagggggctgcagtttccttccttccttctcggcagcgctccgcgcccccatcgcccctcctgcgctagcggaggtgatcgccgcggcgatgccggaggagggttcgggctgctcggtgcggcgcaggccctatgggtgcgtcctgcgggctgctttggtcccattggtcgcgggcttggtgatctgcctcgtggtgtgcatccagcgcttcgcacaggctcagcagcagctgccgctcgagtcacttgggtgggacgtagctgagctgcagctgaatcacacaggacctcagcaggaccccaggctatactggcaggggggcccagcactgggccgctccttcctgcatggaccagagctggacaaggggcagctacgtatccatcgtgatggcatctacatggtacacatccaggtgacgctggccatctgctcctccacgacggcctccaggcaccaccccaccaccctggccgtgggaatctgctctcccgcctcccgtagcatcagcctgctgcgtctcagcttccaccaaggttgtaccattgcctcccagcgcctgacgcccctggcccgaggggacacactctgcaccaacctcactgggacacttttgccttcccgaaacactgatgagaccttctttggagtgcagtgggtgcgcccctgaccactgctgctgattagggttttttaaattttattttattttatttaagttcaagagaaaaagtgtacacacaggggccacccggggttggggtgggagtgtggtggggcgtagtggtggcaggacaagagaaggcattgagctttttctttcattttcctattaaaaaatacaaaaatca

SEQ ID NO: 107 - protein, 193 aa, Homo sapiens
MPEEGSGCSVRRRPYGCVLRAALVPLVAGLVICLVVCIQRFAQAQQQLPLESLGWDVAELQLNHTGPQQDPRLYWQGGPALGRSFLHGPELDKGQLRIHRDGIYMVHIQVTLAICSSTTASRHHPTTLAVGICSPASRSISLLRLSFHQGCTIASQRLTPLARGDTLCTNLTGTLLPSRNTDETFFGVQWVRP

SEQ ID NO: 108 - DNA, 12684 bp, Homo sapiens
  CDS (383)..(10153)
gcgggcgggcgggaggactcgactcggtgggagccgctagagccgggcgcccggggacgtagcctgtagggccaccgggtccccgtcagaggcggcggcgggagcagcggggactgcaggccggggtgcagcgaacgcgaccccgcgggctgcggcccggtgtgtgcggagcgtggcgggcgcagcttaccgggcggaggtgagcgcggcgccggctcctcctgcggcggactttgggtgcgacttgacgagcggtggttcgacaagtggccttgcgggccggatcgtcccagtggaagagttgtaaatttgcttctggccttcccctacggattatacctggccttcccctacggattatactcaacttactgtttagaaaatgtggcccacgagacgcctggttactatcaaaaggagcggggtcgacggtccccactttcccctgagcctcagcacctgcttgtttggaaggggtattgaatgtgacatccgtatccagcttcctgttgtgtcaaaacaacattgcaaaattgaaatccatgagcaggaggcaatattacataatttcagttccacaaatccaacacaagtaaatgggtctgttattgatgagcctgtacggctaaaacatggagatgtaataactattattgatcgttccttcaggtatgaaaatgaaagtcttcagaatggaaggaagtcaactgaatttccaagaaaaatacgtgaacaggagccagcacgtcgtgtctcaagatctagcttctcttctgaccctgatgagaaagctcaagattccaaggcctattcaaaaatcactgaaggaaaagtttcaggaaatcctcaggtacatatcaagaatgtcaaagaagacagtaccgcagatgactcaaaagacagtgttgctcagggaacaactaatgttcattcctcagaacatgctggacgtaatggcagaaatgcagctgatcccatttctggggattttaaagaaatttccagcgttaaattagtgagccgttatggagaattgaagtctgttcccactacacaatgtcttgacaatagcaaaaaaaatgaatctcccttttggaagctttatgagtcagtgaagaaagagttggatgtaaaatcacaaaaagaaaatgtcctacagtattgtagaaaatctggattacaaactgattacgcaacagagaaagaaagtgctgatggtttacagggggagacccaactgttggtctcgcgtaagtcaagaccaaaatctggtgggagcggccacgctgtggcagagcctgcttcacctgaacaagagcttgaccagaacaaggggaagggaagagacgtggagtctgttcagactcccagcaaggctgtgggcgccagctttcctctctatgagccggctaaaatgaagacccctgtacaatattcacagcaacaaaattctccacaaaaacataagaacaaagacctgtatactactggtagaagagaatctgtgaatctgggtaaaagtgaaggcttcaaggctggtgataaaactcttactcccaggaagctttcaactagaaatcgaacaccagctaaagttgaagatgcagctgactctgccactaagccagaaaatctctcttccaaaaccagaggaagtattcctacagatgtggaagttctgcctacggaaactgaaattcacaatgagccatttttaactctgtggctcactcaagttgagaggaagatccaaaaggattccctcagcaagcctgagaaattgggcactacagctggacagatgtgctctgggttacctggtcttagttcagttgatatcaacaactttggtgattccattaatgagagtgagggaatacctttgaaaagaaggcgtgtgtcctttggtgggcacctaagacctgaactatttgatgaaaacttgcctcctaatacgcctctcaaaaggggagaagccccaaccaaaagaaagtctctggtaatgcacactccacctgtcctgaagaaaatcatcaaggaacagcctcaaccatcaggaaaacaagagtcaggttcagaaatccatgtggaagtgaaggcacaaagcttggttataagccctccagctcctagtcctaggaaaactccagttgccagtgatcaacgccgtaggtcctgcaaaacagcccctgcttccagcagcaaatctcagacagaggttcctaagagaggagggagaaagagtggcaacctgccttcaaagagagtgtctatcagccgaagtcaacatgatattttacagatgatatgttccaaaagaagaagtggtgcttcggaagcaaatctgattgttgcaaaatcatgggcagatgtagtaaaacttggtgcaaaacaaacacaaactaaagtcataaaacatggtcctcaaaggtcaatgaacaaaaggcaaagaagacctgctactccaaagaagcctgtgggcgaagttcacagtcaatttagtacaggccacgcaaactctccttgtaccataataatagggaaagctcatactgaaaaagtacatgtgcctgctcgaccctacagagtgctcaacaacttcatttccaaccaaaaaatggactttaaggaagatctttcaggaatagctgaaatgttcaagaccccagtgaaggagcaaccgcagttgacaagcacatgtcacatcgctatttcaaattcagagaatttgcttggaaaacagtttcaaggaactgattcaggagaagaacctctgctccccacctcagagagttttggaggaaatgtgttcttcagtgcacagaatgcagcaaaacagccatctgataaatgctctgcaagccctcccttaagacggcagtgtattagagaaaatggaaacgtagcaaaaacgcccaggaacacctacaaaatgacttctctggagacaaaaacttcagatactgagacagagccttcaaaaacagtatccactgcaaacaggtcaggaaggtctacagagttcaggaatatacagaagctacctgtggaaagtaagagtgaagaaacaaatacagaaattgttgagtgcatcctaaaaagaggtcagaaggcaacactactacaacaaaggagagaaggagagatgaaggaaatagaaagaccttttgagacatataaggaaaatattgaattaaaagaaaacgatgaaaagatgaaagcaatgaagagatcaagaacttgggggcagaaatgtgcaccaatgtctgacctgacagacctcaagagcttgcctgatacagaactcatgaaagacacggcacgtggccagaatctcctccaaacccaagatcatgccaaggcaccaaagagtgagaaaggcaaaatcactaaaatgccctgccagtcattacaaccagaaccaataaacaccccaacacacacaaaacaacagttgaaggcatccctggggaaagtaggtgtgaaagaagagctcctagcagtcggcaagttcacacggacgtcaggggagaccacgcacacgcacagagagccagcaggagatggcaagagcatcagaacgtttaaggagtctccaaagcagatcctggacccagcagcccgtgtaactggaatgaagaagtggccaagaacgcctaaggaagaggcccagtcactagaagacctggctggcttcaaagagctcttccagacaccaggtccctctgaggaatcaatgactgatgagaaaactaccaaaatagcctgcaaatctccaccaccagaatcagtggacactccaacaagcacaaagcaatggcctaagagaagtctcaggaaagcagatgtagaggaagaattcttagcactcaggaaactaacaccatcagcagggaaagccatgcttacgcccaaaccagcaggaggtgatgagaaagacattaaagcatttatgggaactccagtgcagaaactggacctggcaggaactttacctggcagcaaaagacagctacagactcctaaggaaaaggcccaggctctagaagacctggctggctttaaagagctcttccagactcctggtcacaccgaggaattagtggctgctggtaaaaccactaaaataccctgcgactctccacagtcagacccagtggacaccccaacaagcacaaagcaacgacccaagagaagtatcaggaaagcagatgtagagggagaactcttagcgtgcaggaatctaatgccatcagcaggcaaagccatgcacacgcctaaaccatcagtaggtgaagagaaagacatcatcatatttgtgggaactccagtgcagaaactggacctgacagagaacttaaccggcagcaagagacggccacaaactcctaaggaagaggcccaggctctggaagacctgactggctttaaagagctcttccagacccctggtcatactgaagaagcagtggctgctggcaaaactactaaaatgccctgcgaatcttctccaccagaatcagcagacaccccaacaagcacaagaaggcagcccaagacacctttggagaaaagggacgtacagaaggagctctcagccctgaagaagctcacacagacatcaggggaaaccacacacacagataaagtaccaggaggtgaggataaaagcatcaacgcgtttagggaaactgcaaaacagaaactggacccagcagcaagtgtaactggtagcaagaggcacccaaaaactaaggaaaaggcccaacccctagaagacctggctggcttgaaagagctcttccagacaccagtatgcactgacaagcccacgactcacgagaaaactaccaaaatagcctgcagatcacaaccagacccagtggacacaccaacaagctccaagccacagtccaagagaagtctcaggaaagtggacgtagaagaagaattcttcgcactcaggaaacgaacaccatcagcaggcaaagccatgcacacacccaaaccagcagtaagtggtgagaaaaacatctacgcatttatgggaactccagtgcagaaactggacctgacagagaacttaactggcagcaagagacggctacaaactcctaaggaaaaggcccaggctctagaagacctggctggctttaaagagctcttccagacacgaggtcacactgaggaatcaatgactaacgataaaactgccaaagtagcctgcaaatcttcacaaccagacccagacaaaaacccagcaagctccaagcgacggctcaagacatccctggggaaagtgggcgtgaaagaagagctcctagcagttggcaagctcacacagacatcaggagagactacacacacacacacagagccaacaggagatggtaagagcatgaaagcatttatggagtctccaaagcagatcttagactcagcagcaagtctaactggcagcaagaggcagctgagaactcctaagggaaagtctgaagtccctgaagacctggccggcttcatcgagctcttccagacaccaagtcacactaaggaatcaatgactaacgaaaaaactaccaaagtatcctacagagcttcacagccagacctagtggacaccccaacaagctccaagccacagcccaagagaagtctcaggaaagcagacactgaagaagaatttttagcatttaggaaacaaacgccatcagcaggcaaagccatgcacacacccaaaccagcagtaggtgaagagaaagacatcaacacgtttttgggaactccagtgcagaaactggaccagccaggaaatttacctggcagcaatagacggctacaaactcgtaaggaaaaggcccaggctctagaagaactgactggcttcagagagcttttccagacaccatgcactgataaccccacgactgatgagaaaactaccaaaaaaatactctgcaaatctccgcaatcagacccagcggacaccccaacaaacacaaagcaacggcccaagagaagcctcaagaaagcagacgtagaggaagaatttttagcattcaggaaactaacaccatcagcaggcaaagccatgcacacgcctaaagcagcagtaggtgaagagaaagacatcaacacatttgtggggactccagtggagaaactggacctgctaggaaatttacctggcagcaagagacggccacaaactcctaaagaaaaggccaaggctctagaagatctggctggcttcaaagagctcttccagacaccaggtcacactgaggaatcaatgaccgatgacaaaatcacagaagtatcctgcaaatctccacaaccagacccagtcaaaaccccaacaagctccaagcaacgactcaagatatccttggggaaagtaggtgtgaaagaagaggtcctaccagtcggcaagctcacacagacgtcagggaagaccacacagacacacagagagacagcaggagatggaaagagcatcaaagcgtttaaggaatctgcaaagcagatgctggacccagcaaactatggaactgggatggagaggtggccaagaacacctaaggaagaggcccaatcactagaagacctggccggcttcaaagagctcttccagacaccagaccacactgaggaatcaacaactgatgacaaaactaccaaaatagcctgcaaatctccaccaccagaatcaatggacactccaacaagcacaaggaggcggcccaaaacacctttggggaaaagggatatagtggaagagctctcagccctgaagcagctcacacagaccacacacacagacaaagtaccaggagatgaggataaaggcatcaacgtgttcagggaaactgcaaaacagaaactggacccagcagcaagtgtaactggtagcaagaggcagccaagaactcctaagggaaaagcccaacccctagaagacttggctggcttgaaagagctcttccagacaccaatatgcactgacaagcccacgactcatgagaaaactaccaaaatagcctgcagatctccacaaccagacccagtgggtaccccaacaatcttcaagccacagtccaagagaagtctcaggaaagcagacgtagaggaagaatccttagcactcaggaaacgaacaccatcagtagggaaagctatggacacacccaaaccagcaggaggtgatgagaaagacatgaaagcatttatgggaactccagtgcagaaattggacctgccaggaaatttacctggcagcaaaagatggccacaaactcctaaggaaaaggcccaggctctagaagacctggctggcttcaaagagctcttccagacaccaggcactgacaagcccacgactgatgagaaaactaccaaaatagcctgcaaatctccacaaccagacccagtggacaccccagcaagcacaaagcaacggcccaagagaaacctcaggaaagcagacgtagaggaagaatttttagcactcaggaaacgaacaccatcagcaggcaaagccatggacacaccaaaaccagcagtaagtgatgagaaaaatatcaacacatttgtggaaactccagtgcagaaactggacctgctaggaaatttacctggcagcaagagacagccacagactcctaaggaaaaggctgaggctctagaggacctggttggcttcaaagaactcttccagacaccaggtcacactgaggaatcaatgactgatgacaaaatcacagaagtatcctgtaaatctccacagccagagtcattcaaaacctcaagaagctccaagcaaaggctcaagatacccctggtgaaagtggacatgaaagaagagcccctagcagtcagcaagctcacacggacatcaggggagactacgcaaacacacacagagccaacaggagatagtaagagcatcaaagcgtttaaggagtctccaaagcagatcctggacccagcagcaagtgtaactggtagcaggaggcagctgagaactcgtaaggaaaaggcccgtgctctagaagacctggttgacttcaaagagctcttctcagcaccaggtcacactgaagagtcaatgactattgacaaaaacacaaaaattccctgcaaatctcccccaccagaactaacagacactgccacgagcacaaagagatgccccaagacacgtcccaggaaagaagtaaaagaggagctctcagcagttgagaggctcacgcaaacatcagggcaaagcacacacacacacaaagaaccagcaagcggtgatgagggcatcaaagtattgaagcaacgtgcaaagaagaaaccaaacccagtagaagaggaacccagcaggagaaggccaagagcacctaaggaaaaggcccaacccctggaagacctggccggcttcacagagctctctgaaacatcaggtcacactcaggaatcactgactgctggcaaagccactaaaataccctgcgaatctcccccactagaagtggtagacaccacagcaagcacaaagaggcatctcaggacacgtgtgcagaaggtacaagtaaaagaagagccttcagcagtcaagttcacacaaacatcaggggaaaccacggatgcagacaaagaaccagcaggtgaagataaaggcatcaaagcattgaaggaatctgcaaaacagacaccggctccagcagcaagtgtaactggcagcaggagacggccaagagcacccagggaaagtgcccaagccatagaagacctagctggcttcaaagacccagcagcaggtcacactgaagaatcaatgactgatgacaaaaccactaaaataccctgcaaatcatcaccagaactagaagacaccgcaacaagctcaaagagacggcccaggacacgtgcccagaaagtagaagtgaaggaggagctgttagcagttggcaagctcacacaaacctcaggggagaccacgcacaccgacaaagagccggtaggtgagggcaaaggcacgaaagcatttaagcaacctgcaaagcggaagctggacgcagaagatgtaattggcagcaggagacagccaagagcacctaaggaaaaggcccaacccctggaagatctggccagcttccaagagctctctcaaacaccaggccacactgaggaactggcaaatggtgctgctgatagctttacaagcgctccaaagcaaacacctgacagtggaaaacctctaaaaatatccagaagagttcttcgggcccctaaagtagaacccgtgggagacgtggtaagcaccagagaccctgtaaaatcacaaagcaaaagcaacacttccctgcccccactgcccttcaagaggggaggtggcaaagatggaagcgtcacgggaaccaagaggctgcgctgcatgccagcaccagaggaaattgtggaggagctgccagccagcaagaagcagagggttgctcccagggcaagaggcaaatcatccgaacccgtggtcatcatgaagagaagtttgaggacttctgcaaaaagaattgaacctgcggaagagctgaacagcaacgacatgaaaaccaacaaagaggaacacaaattacaagactcggtccctgaaaataagggaatatccctgcgctccagacgccaaaataagactgaggcagaacagcaaataactgaggtctttgtattagcagaaagaatagaaataaacagaaatgaaaagaagcccatgaagacctccccagagatggacattcagaatccagatgatggagcccggaaacccatacctagagacaaagtcactgagaacaaaaggtgcttgaggtctgctagacagaatgagagctcccagcctaaggtggcagaggagagcggagggcagaagagtgcgaaggttctcatgcagaatcagaaagggaaaggagaagcaggaaattcagactccatgtgcctgagatcaagaaagacaaaaagccagcctgcagcaagcactttggagagcaaatctgtgcagagagtaacgcggagtgtcaagaggtgtgcagaaaatccaaagaaggctgaggacaatgtgtgtgtcaagaaaataagaaccagaagtcatagggacagtgaagatatttgacagaaaaatcgaactgggaaaaatataataaagttagttttgtgataagttctagtgcagtttttgtcataaattacaagtgaattctgtaagtaaggctgtcagtctgcttaagggaagaaaactttggatttgctgggtctgaatcggcttcataaactccactgggagcactgctgggctcctggactgagaatagttgaacaccgggggctttgtgaaggagtctgggccaaggtttgccctcagctttgcagaatgaagccttgaggtctgtcaccacccacagccaccctacagcagccttaactgtgacacttgccacactgtgtcgtcgtttgtttgcctatgtcctccagggcacggtggcaggaacaactatcctcgtctgtcccaacactgagcaggcactcggtaaacacgaatgaatggatgagcgcacggatgaatggagcttacaagatctgtctttccaatggccgggggcatttggtccccaaattaaggctattggacatctgcacaggacagtcctatttttgatgtcctttcctttctgaaaataaagttttgtgctttggagaatgactcgtgagcacatctttagggaccaagagtgactttctgtaaggagtgactcgtggcttgccttggtctcttgggaatacttttctaactagggttgctctcacctgagacattctccacccgcggaatctcagggtcccaggctgtgggccatcacgacctcaaactggctcctaatctccagctttcctgtcattgaaagcttcggaagtttactggctctgctcccgcctgttttctttctgactctatctggcagcccgatgccacccagtacaggaagtgacaccagtactctgtaaagcatcatcatccttggagagactgagcactcagcaccttcagccacgatttcaggatcgcttccttgtgagccgctgcctccgaaatctcctttgaagcccagacatctttctccagcttcagacttgtagatataactcgttcatcttcatttactttccactttgccccctgtcctctctgtgttccccaaatcagagaatagcccgccatcccccaggtcacctgtctggattcctccccattcacccaccttgccaggtgcaggtgaggatggtgcaccagacagggtagctgtcccccaaaatgtgccctgtgcgggcagtgccctgtctccacgtttgtttccccagtgtctggcggggagccaggtgacatcataaatacttgctgaatgaatgcagaaatcagcggtactgacttgtactatattggctgccatgatagggttctcacagcgtcatccatgatcgtaagggagaatgacattctgcttgagggagggaatagaaaggggcagggaggggacatctgagggcttcacagggctgcaaagggtacagggattgcaccagggcagaacaggggagggtgttcaaggaagagtggctcttagcagaggcactttggaaggtgtgaggcataaatgcttccttctacgtaggccaacctcaaaactttcagtaggaatgttgctatgatcaagttgttctaacactttagacttagtagtaattatgaacctcacatagaaaaatttcatccagccatatgcctgtggagtggaatattctgtttagtagaaaaatcctttagagttcagctctaaccagaaatcttgctgaagtatgtcagcaccttttctcaccctggtaagtacagtatttcaagagcacgctaagggtggttttcattttacagggctgttgatgatgggttaaaaatgttcatttaagggctacccccgtgtttaatagatgaacaccacttctacacaaccctccttggtactgggggagggagagatctgacaaatactgcccattcccctaggctgactggatttgagaacaaatacccacccatttccaccatggtatggtaacttctctgagcttcagtttccaagtgaatttccatgtaataggacattcccattaaatacaagctgtttttactttttcgcctcccagggcctgtgggatctggtcccccagcctctcttgggctttcttacactaactctgtacctaccatctcctgcctcccttaggcaggcacctccaaccaccacacactccctgctgttttccctgcctggaactttccctcctgccccaccaagatcatttcatccagtcctgagctcagcttaagggaggcttcttgcctgtgggttccctcacccccatgcctgtcctccaggctggggcaggttcttagtttgcctggaattgttctgtacctctttgtagcacgtagtgttgtggaaactaagccactaattgagtttctggctcccctcctggggttgtaagttttgttcattcatgagggccgactgcatttcctggttactctatcccagtgaccagccacaggagatgtccaataaagtatgtgatgaaatggtcttaaaa

SEQ ID NO: 109 - protein, 3256 aa, Homo sapiens
MWPTRRLVTIKRSGVDGPHFPLSLSTCLFGRGIECDIRIQLPVVSKQHCKIEIHEQEAILHNFSSTNPTQVNGSVIDEPVRLKHGDVITIIDRSFRYENESLQNGRKSTEFPRKIREQEPARRVSRSSFSSDPDEKAQDSKAYSKITEGKVSGNPQVHIKNVKEDSTADDSKDSVAQGTTNVHSSEHAGRNGRNAADPISGDFKEISSVKLVSRYGELKSVPTTQCLDNSKKNESPFWKLYESVKKELDVKSQKENVLQYCRKSGLQTDYATEKESADGLQGETQLLVSRKSRPKSGGSGHAVAEPASPEQELDQNKGKGRDVESVQTPSKAVGASFPLYEPAKMKTPVQYSQQQNSPQKHKNKDLYTTGRRESVNLGKSEGFKAGDKTLTPRKLSTRNRTPAKVEDAADSATKPENLSSKTRGSIPTDVEVLPTETEIHNEPFLTLWLTQVERKIQKDSLSKPEKLGTTAGQMCSGLPGLSSVDINNFGDSINESEGIPLKRRRVSFGGHLRPELFDENLPPNTPLKRGEAPTKRKSLVMHTPPVLKKIIKEQPQPSGKQESGSEIHVEVKAQSLVISPPAPSPRKTPVASDQRRRSCKTAPASSSKSQTEVPKRGGRKSGNLPSKRVSISRSQHDILQMICSKRRSGASEANLIVAKSWADVVKLGAKQTQTKVIKHGPQRSMNKRQRRPATPKKPVGEVHSQFSTGHANSPCTIIIGKAHTEKVHVPARPYRVLNNFISNQKMDFKEDLSGIAEMFKTPVKEQPQLTSTCHIAISNSENLLGKQFQGTDSGEEPLLPTSESFGGNVFFSAQNAAKQPSDKCSASPPLRRQCIRENGNVAKTPRNTYKMTSLETKTSDTETEPSKTVSTANRSGRSTEFRNIQKLPVESKSEETNTEIVECILKRGQKATLLQQRREGEMKEIERPFETYKENIELKENDEKMKAMKRSRTWGQKCAPMSDLTDLKSLPDTELMKDTARGQNLLQTQDHAKAPKSEKGKITKMPCQSLQPEPINTPTHTKQQLKASLGKVGVKEELLAVGKFTRTSGETTHTHREPAGDGKSIRTFKESPKQILDPAARVTGMKKWPRTPKEEAQSLEDLAGFKELFQTPGPSEESMTDEKTTKIACKSPPPESVDTPTSTKQWPKRSLRKADVEEEFLALRKLTPSAGKAMLTPKPAGGDEKDIKAFMGTPVQKLDLAGTLPGSKRQLQTPKEKAQALEDLAGFKELFQTPGHTEELVAAGKTTKIPCDSPQSDPVDTPTSTKQRPKRSIRKADVEGELLACRNLMPSAGKAMHTPKPSVGEEKDIIIFVGTPVQKLDLTENLTGSKRRPQTPKEEAQALEDLTGFKELFQTPGHTEEAVAAGKTTKMPCESSPPESADTPTSTRRQPKTPLEKRDVQKELSALKKLTQTSGETTHTDKVPGGEDKSINAFRETAKQKLDPAASVTGSKRHPKTKEKAQPLEDLAGLKELFQTPVCTDKPTTHEKTTKIACRSQPDPVDTPTSSKPQSKRSLRKVDVEEEFFALRKRTPSAGKAMHTPKPAVSGEKNIYAFMGTPVQKLDLTENLTGSKRRLQTPKEKAQALEDLAGFKELFQTRGHTEESMTNDKTAKVACKSSQPDPDKNPASSKRRLKTSLGKVGVKEELLAVGKLTQTSGETTHTHTEPTGDGKSMKAFMESPKQILDSAASLTGSKRQLRTPKGKSEVPEDLAGFIELFQTPSHTKESMTNEKTTKVSYRASQPDLVDTPTSSKPQPKRSLRKADTEEEFLAFRKQTPSAGKAMHTPKPAVGEEKDINTFLGTPVQKLDQPGNLPGSNRRLQTRKEKAQALEELTGFRELFQTPCTDNPTTDEKTTKKILCKSPQSDPADTPTNTKQRPKRSLKKADVEEEFLAFRKLTPSAGKAMHTPKAAVGEEKDINTFVGTPVEKLDLLGNLPGSKRRPQTPKEKAKALEDLAGFKELFQTPGHTEESMTDDKITEVSCKSPQPDPVKTPTSSKQRLKISLGKVGVKEEVLPVGKLTQTSGKTTQTHRETAGDGKSIKAFKESAKQMLDPANYGTGMERWPRTPKEEAQSLEDLAGFKELFQTPDHTEESTTDDKTTKIACKSPPPESMDTPTSTRRRPKTPLGKRDIVEELSALKQLTQTTHTDKVPGDEDKGINVFRETAKQKLDPAASVTGSKRQPRTPKGKAQPLEDLAGLKELFQTPICTDKPTTHEKTTKIACRSPQPDPVGTPTIFKPQSKRSLRKADVEEESLALRKRTPSVGKAMDTPKPAGGDEKDMKAFMGTPVQKLDLPGNLPGSKRWPQTPKEKAQALEDLAGFKELFQTPGTDKPTTDEKTTKIACKSPQPDPVDTPASTKQRPKRNLRKADVEEEFLALRKRTPSAGKAMDTPKPAVSDEKNINTFVETPVQKLDLLGNLPGSKRQPQTPKEKAEALEDLVGFKELFQTPGHTEESMTDDKITEVSCKSPQPESFKTSRSSKQRLKIPLVKVDMKEEPLAVSKLTRTSGETTQTHTEPTGDSKSIKAFKESPKQILDPAASVTGSRRQLRTRKEKARALEDLVDFKELFSAPGHTEESMTIDKNTKIPCKSPPPELTDTATSTKRCPKTRPRKEVKEELSAVERLTQTSGQSTHTHKEPASGDEGIKVLKQRAKKKPNPVEEEPSRRRPRAPKEKAQPLEDLAGFTELSETSGHTQESLTAGKATKIPCESPPLEVVDTTASTKRHLRTRVQKVQVKEEPSAVKFTQTSGETTDADKEPAGEDKGIKALKESAKQTPAPAASVTGSRRRPRAPRESAQAIEDLAGFKDPAAGHTEESMTDDKTTKIPCKSSPELEDTATSSKRRPRTRAQKVEVKEELLAVGKLTQTSGETTHTDKEPVGEGKGTKAFKQPAKRKLDAEDVIGSRRQPRAPKEKAQPLEDLASFQELSQTPGHTEELANGAADSFTSAPKQTPDSGKPLKISRRVLRAPKVEPVGDVVSTRDPVKSQSKSNTSLPPLPFKRGGGKDGSVTGTKRLRCMPAPEEIVEELPASKKQRVAPRARGKSSEPVVIMKRSLRTSAKRIEPAEELNSNDMKTNKEEHKLQDSVPENKGISLRSRRQNKTEAEQQITEVFVLAERIEINRNEKKPMKTSPEMDIQNPDDGARKPIPRDKVTENKRCLRSARQNESSQPKVAEESGGQKSAKVLMQNQKGKGEAGNSDSMCLRSRKTKSQPAASTLESKSVQRVTRSVKRCAENPKKAEDNVCVKKIRTRSHRDSEDI

SEQ ID NO: 110 - DNA, 16079 bp, Homo sapiens
  CDS (585)..(15074)
tattctcacaccagagccgtgaccgagacccagaggtccgcttccggccacggccgaacagctgcaccgtgcgtaccgggaacggtcaaggcgcagctggaaccgctgcaaaaggcctccgggcgtaccggacaggtcgcaagggcgggggtccccacctagcggaaatgcacggaggccaacccctccccctgcccccgcgaggagcggggcggactcggcagccgccactccccaggctcacaggaagaaactgggacgctgcggacgcggaactggccagacccgcggcgcgtggcacgcgcgagccctcccgcgcatgctccacccgccggcctccagcccgcgccccgggccccgcctccctccctgcttctccccctctcccgtcagcctccctccgagtttggcccctccggccgggcgatcgacgttccgcgtgcgtgcgggcgcctgacttcacttccggctaacgcgctcggcttgccccctggccccggatggtgactggtggtggtgctgcacctcccgggactgtcactgagccgcttcccagtgtgattgtgctgagcgcaggccggaagatggcggctgcggctgcggcggcctcgggccccggctgctcctcggcggcgggggcgggggcggccggggtctcagagtggctggtgctgcgggacggctgcatgcactgcgacgccgacgggctgcacagcctgtcctaccaccctgcgctcaacgccatcctggccgtcactagccgcgggaccatcaaagtcatcgacggcacctcgggggccacactgcaggcctccgcgctcagtgctaaaccaggtggacaggtgaaatgtcagtatatctctgctgtggataaagttatatttgtggatgattatgcagtagggtgtaggaaggaccttaatggaatcttgttgttagacactgctctgcaaactccagtttcaaagcaggatgatgtggttcagcttgaattacccgttacagaggcacagcagctcttatcagcatgtttagaaaaggtagatatttctagtacagagggttatgatttgttcatcacacagctcaaagatggtttaaaaaatacatctcatgagactgcagcaaaccacaaagttgctaagtgggccacagttacatttcatcttcctcatcatgtgttgaagtccattgccagtgccattgtaaatgaactcaagaaaataaatcaaaatgttgctgccttacctgtggcgtcctcagtgatggacagattgtcttacctcttacctagtgcacgtccagaactcggagtggggccaggccgttctgtagacagatcactgatgtatagtgaagctaacagacgggagacatttacctcatggcctcatgtaggctataggtgggcacaaccagatcccatggctcaagctggattttatcatcagcctgcctcatctggagatgatagagccatgtgttttacttgtagtgtatgcctcgtttgttgggaacctactgatgaaccttggtctgaacacgaaagacattccccaaactgcccatttgtgaaaggtgagcacacacagaatgtgccattgtcagtcactcttgcaacaagtcctgcacagtttccttgtacggatggaactgacagaatatcttgctttgggtcggggagctgccctcattttctagctgctgcaactaaacgaggaaagatctgcatatgggatgtttccaaacttatgaaggtgcacttaaagtttgaaattaatgcctatgatccagcaattgtacaacagcttattctatcaggagacccaagctcaggagttgattcaaggagaccaactttggcgtggctggaggactcctctagttgctcagatataccaaaattggaaggagatagtgatgatttactggaggattcagacagtgaagagcattccagatcagattctgtgacagggcatacatcacagaaggaagccatggaagtaagccttgatataacagcactcagcattctccaacagccagaaaaacttcagtgggagattgttgcaaatgtgcttgaagatactgttaaggatcttgaagaacttggggcaaatccttgtttaacaaactctaagagtgaaaagacaaaggaaaagcaccaggagcaacacaacattccttttccatgtttattagctggaggtttattaacatataaatctcctgctacctcacccattagtagtaattctcacaggtcactggatggtttaagcagaactcagggtgaaagtatatcagaacaagggtcaactgacaatgaatcctgcactaattcagaactaaattctcctctggtaaggaggactttaccggttttgcttctttatagcatcaaggaatctgatgagaaagcaggaaagatcttttcacagatgaacaatattatgagtaaaagtttgcatgatgatggttttactgttccacagattattgaaatggagctggatagtcaggagcagttgttattgcaggatcctcctgtgacttacattcagcaatttgcagatgcagcagccaaccttacctctccggattctgagaagtggaactctgtgtttcccaagcctgggactttggttcagtgcttgaggctgccaaagtttgcagaggaggagaatctttgtatagactcaataactccttgtgctgacggaattcatttgttggtaggactgcggacatgccctgttgaatccttgagtgcaataaatcaagtagaggccttgaataatttaaataaattaaactctgcactatgtaatagacggaaaggtgagctggaatcaaatcttgctgtagtgaatggtgcaaatattagtgtaatccaacatgaatcaccagcagatgtacagactcctttaataattcagcctgagcagaggaatgttagtggtggatatttagtgctttataaaatgaattatgccactcggatagtgactttagaagaggagccaataaaaatacaacatatcaaagatccccaggacacaattacctcgctcattttgcttccacccgatatattggataatcgagaggatgactgtgaggaacctattgaggacatgcagttaacctcaaagaatggttttgagagagaaaaaacgtctgacatttctactcttggacacctggtaataaccactcagggaggatatgtaaaaatactagatctttcaaactttgaaattttggccaaagtggagcctcccaaaaaggagggcactgaggaacaggacacatttgtttctgtgatttactgttctggcacagacaggctgtgtgcatgcaccaaaggtggtgagcttcattttctccaaattggaggaacctgtgatgatattgatgaagctgatatactagtggatggatctctttctaaaggaatagaaccatcttcagaaggttccaaacctttatcaaatccttcaagtcctggcatttcaggagttgatttattggtggaccagccattcacccttgaaatcttgacatccctagtggagctaacccgctttgagactttgactccaaggttttcagcgactgttcctccatgctgggtagaagttcaacaagaacagcagcaaaggaggcatcctcaacatttgcatcagcaacaccatggtgatgctgctcagcatactcgaacttggaaactacagaccgacagcaacagctgggatgaacatgtatttgaattagtactacctaaagcttgtatggttggacatgtggacttcaaattcgttttgaactcaaacatcaccaatattccacagatacaagtgacactgctgaaaaataaagctccaggattagggaaagtcaatgctcttaacattgaagtggaacaaaatgggaaaccgtccctggttgatttgaatgaagaaatgcagcacatggatgtagaggaatcacagtgtcttagattatgtccatttttggaggatcataaagaagacattctatgtgggccagtatggcttgctagtggccttgatctatcagggcatgctggaatgttgacgttaacaagccccaaacttgttaaaggtatggcaggaggaaaatatcgttcgtttttaatccatgtcaaggcagtgaatgaaagaggaacagaagagatttgtaatggtggtatgcgtcctgtagtaaggcttccatccctaaaacaccagagtaacaagggttattcacttgcttcacttttggctaaagttgcagcaggcaaggaaaaatcatctaatgttaagaatgaaaatacaagtggcacccgtaaatctgaaaacctccggggctgtgatttacttcaagaggtctcagtcaccattcgaagatttaagaaaacctcaatttctaaggaaagagtgcaacgatgtgccatgttacagttttcagaatttcatgagaagcttcttaatactctttgcagaaaaacagatgatggccagatcacagaacatgcccagagccttgtgttggatactctctgttggttagctggagttcattcaaatggacccggaagctcaaaggaaggaaatgagaacctactttcaaaaacacgaaaatttctgtcagacatcgtacgtgtttgcttctttgaggcaggacgaagtatagcccataagtgtgcccgatttctagccttgtgcattagtaatggcaaatgtgacccatgtcaaccagcatttggacctgttctgttgaaggctttacttgataatatgtcatttttacctgcagcaacaactggtggttctgtctattggtattttgtcttactgaattatgtgaaagatgaagatctggctggatgcagtacagcttgtgcatctttgcttactgcagtgtccagacagttacaggacaggctaacaccaatggaggctttacttcagacaagatatggattatatagctcaccatttgatccagtcctctttgatttggagatgagtggctcttcttgtaaaaatgtttataacagcagcattggtgtccagtcagatgaaattgatttatcagatgtcctttcaggaaatggaaaggtcagtagttgcacagctgctgagggtagtttcacatctctcactggacttttggaagttgaacctctgcactttacttgtgtgtcaactagtgatggaaccagaatagaaagggatgatgcaatgagttccttcggggttactcctgcagtaggtggactatcatctgggacagttggggaagcctcgacagccctgagttcagcagcccaggtagctttgcagtctctctctcatgcaatggcttcagccgagcaacagctacaggtgctgcaagagaaacagcagcagcttttgaagcttcagcaacagaaagcaaagctggaagccaagttacatcagacaacagctgcagcagctgcagcagcatcagcagtaggtcctgttcacaactctgtgccttccaacccagtggctgcccctggattcttcattcatccatctgatgttattccacccactccaaaaacaacacctctttttatgactccaccactcactccacccaatgaagcagtttccgttgtgattaatgccgaacttgcacagcttttcccaggctcagtcattgatcccccagcagtcaatcttgctgcacataacaaaaattccaacaagtccagaatgaatccacttggttctggtctagcccttgcaatttctcatgcttcacattttcttcaacctccgcctcaccagtccattattatagagcgaatgcattcaggagcaagaagatttgtgaccttggattttgggaggcctatattgttgactgatgtattgattcccacttgtggagacttggcctctttgtcaattgacatttggacattaggagaagaggtggatggaaggcggttggtagtggcaactgatataagcactcattcactaattcttcatgacttaataccacctcccgtgtgcagattcatgaagatcactgttattggacgttacgggagtacaaatgccagagccaaaatcccattaggattttactatggtcatacctacatcttgccttgggaaagtgaactgaagttaatgcatgatcctctaaagggagagggagaatctgcaaaccagccagaaattgaccagcatttagcaatgatggttgctttgcaggaggatatacagtgcaggtataacttggcttgtcatcgtctggaaacccttttgcaaagtattgatcttcctcctctaaacagtgctaacaatgcacagtactttttacgaaaaccagataaggcagttgaggaagacagtagggttttttctgcttatcaagattgtattcagctacagcttcaactaaatttggctcataatgcagtgcagaggctcaaagtggcgctaggtgcaagccggaagatgttgagtgaaacatcaaatccagaagatttaattcagacatcttccacagagcagttacgtactatcatcagatatttactggacactttgctcagcctgcttcatgcttctaatggacactctgttcctgcagttttgcagagcacatttcatgcccaggcctgtgaagagctctttaaacacttgtgcatcagtggaaccccaaagatacggttacatactggtcttcttcttgttcaactgtgtggtggtgaaaggtggtggggtcaatttctttctaatgtccttcaggaattgtacaattcggaacagcttctcatctttccacaggatagggtcttcatgttactttcctgcattggtcaaagatcacttagtaatagtggagtattagaaagcttacttaatctcttggataatttattgtcacctcttcagccacagttacccatgcataggaggacagaaggagtactagatattcccatgatcagttgggttgttatgctggtgtccaggttgctggattatgtggcaactgttgaagatgaagcagcagctgcaaagaaacctttgaatggtaatcagtggagttttattaacaataatctacacactcagagcttaaatagatcttctaaaggcagcagtagccttgatagattatattccagaaaaatcagaaagcagcttgttcatcataaacagcaacttaacctactaaaagcaaagcagaaggcattggtagaacagatggaaaaagaaaaaatacaaagtaacaaaggatcatcatataaactcctggtagaacaagcaaaactaaagcaggccacttcaaagcactttaaggatttaattcgtttacgtcggacagcagaatggtcccgttctaatttagacacagaagttacaacagcaaaagaaagtcctgagatagaaccacttccatttactctggcccatgagcgttgtatctcagtagtccagaaacttgttctgtttcttctctccatggactttacatgtcatgcagatctcttattgtttgtttgtaaggttcttgcacgcattgcaaatgccacgaggccaactattcatctgtgtgagattgtgaacgaaccccagctggaaagactgctgttacttttggttggaactgacttcaatagaggagatatatcttggggtggtgcttgggctcagtattccttaacttgcatgctacaagatattttagcaggagaattactggctccagtagccgcagaagccatggaggaaggaacagtgggtgatgatgtaggtgcgacagctggtgactctgatgactcccttcaacagtcctcagttcagttgctggaaactatagatgaacctttgacacatgacataacaggtgcacctcctctgtcctctttggaaaaagataaagaaattgaccttgagttacttcaggatctaatggaagttgacattgatcctttagatattgatttggaaaaggaccctcttgcagccaaggtttttaagccaataagcagtacatggtatgattattggggtgctgattatgggacctacaattacaacccttacattggaggtctgggaattcctgtagcaaagccaccagcaaacacggagaagaacggatcacagacagttagcgtttcagtctctcaggccctggatgctcgcctagaagttggacttgaacagcaagcagaactgatgttgaaaatgatgtctactctggaggcagattccattttacaggcattaacaaatacatctcctacattatcacagtctcccactggaacagatgattcacttctagggggtttacaagcagcaaaccaaaccagccagcttattatacagttatcatctgtcccaatgttaaatgtttgtttcaacaaacttttttccatgcttcaagtccatcatgttcagttggagtcacttctccaattgtggctcacactgagcctgaattctagttcaactggaaacaaagaaaatggagcagacatatttttatataatgctaataggatacctgttatttcattaaatcaagcatcaataactagctttctcacagtgttagcttggtatcccaatactttgctccggacatggtgccttgtgcttcatagcctaacactcatgacaaacatgcagcttaattctggttccagcagtgccattggaactcaggagagtactgctcatttgttggtttcagatccaaacctaattcatgtattagtgaaatttctttctggcaccagtccacatggaacaaatcaacacagtccacaggttggtcctacagctacacaagctatgcaagaatttcttactcgattacaagtgcatctttcttcaacatgtcctcagatattcagtgaatttttgctcaagctaattcatatactttcaactgaaaggggtgctttccagacaggccaaggacctctcgatgcccaagtgaagctcttagaattcactctggagcagaattttgaagtcgtttcagttagtactatttctgccgtgatagaatcggttacatttttagtgcaccactatatcacttgctcagacaaagtaatgtcaagaagtggatcagatagctccgtgggtgctcgagcatgctttgggggactctttgccaatcttattcgtccgggtgatgcaaaagcagtttgtggcgaaatgacaagagatcaactcatgtttgatttgttaaaacttgttaacattttagtgcagctgcctctttcaggcaatagggaatacagtgcaagagtgtctgtgaccacaaatacaacagatagtgtttcagatgaagaaaaagtctcaggaggcaaagatggcaatggaagcagtaccagtgttcaaggatcgcctgcatatgttgctgacttagtcttagccaaccaacaaattatgagccagattttgtctgctctgggcctgtgtaatagcagtgccatggcaatgataattggagcaagtggattacatctcactaaacatgaaaactttcatggtgggttggatgccatatcagttggggatggattatttaccatactgacaacccttagtaaaaaagcttctacagtccacatgatgctgcagccaattttaacatacatggcctgtggatatatgggcagacaaggctctcttgctacttgccagttatctgagccattattgtggttcattttgagagtattggatactagtgatgccttgaaagcatttcatgatatgggtggtgttcagctcatatgcaataatatggttactagtacaagggctattgtgaacactgcaagaagtatggtatcaactattatgaaatttcttgactctggtccaaataaagctgttgacagcacattgaaaacaagaatactagcttctgagcctgacaatgctgaagggattcataactttgcacccctcggtacaatcacatctagcagtcctactgcccaaccagctgaagtgctattgcaggccacacctcctcacagaagagctcgctctgctgcttggtcctacatctttcttccagaggaggcttggtgtgaccttaccattcaccttcctgcagcagtgctgcttaaggagatacatatccagcctcatcttgcatctcttgcaacctgcccttcctcagtgtctgttgaagtaagtgcagatggggtaaatatgctacctttgtccactcctgttgtcacaagtggcctcacctacataaaaattcagcttgtaaaagccgaagtagcttctgctgtctgccttagactacatcgtccacgggatgccagcacattaggcctttcacaaattaaattattggggctcactgcttttggtaccacctcttctgcaacagttaataatccattccttccatctgaagatcaggtatccaaaacaagtattggatggttacggttattacatcattgccttactcacataagtgatctagaaggaatgatggcaagtgcagctgcacctactgctaatctgctgcagacttgtgcggccttattgatgtcaccttactgtggaatgcattcacccaacatcgaggttgtgcttgtaaagataggactgcagtctactagaattggcctgaagctcatagacattctcctgagaaattgtgcagcatcaggcagtgatcctacagatttgaatagtcctttactttttggaagactaaatggactctcttctgactctacgatagatattctttaccagcttggaacaactcaggatcctggtacaaaagacagaattcaggccttgttaaaatgggttagtgattctgcaagagtggctgctatgaagagaagtggcaggatgaactacatgtgtcctaactcctcaacagtagagtatggtcttctgatgccatctccttctcatttgcactgtgtagcagccattctgtggcatagttatgagctgcttgtagaatatgacttaccagcactcctggaccaagagctctttgagttactttttaattggtccatgtctcttccctgcaatatggttttgaagaaagctgttgacagtctactttgctcaatgtgtcacgtacacccaaactatttttctttgctcatgggctggatgggaattacccctcctccagtgcaatgtcatcatagactgtccatgacagatgatagcaaaaagcaggatcttagttcatctttaacagatgactctaaaaatgcacaagcacctctcgcattaactgaatcacatttggctacccttgcttcctcttctcaatctcctgaagctattaaacaattactagactcaggtttgccttctcttcttgtgaggagtctggctagtttctgctttagccacatttctagctcagaaagcattgcccagtcaatagatatttcccaggacaaactcaggcgccatcatgtcccacaacaatgtaataagatgcctatcacagccgacctagttgctcctattcttaggtttttgacagaagttggcaatagccatattatgaaagattggcttggtggttctgaagtcaatccactatggacagcacttctgtttttattgtgtcactctgggtccacttctggaagccataatttaggtgcacaacagaccagtgcaagatcagcttctctttcttcagctgctacaacaggactgactactcaacagcgcacagcaattgagaatgcaactgttgcgttctttctacagtgcatttcatgccatcctaataatcaaaagctgatggcacaggttctttgtgaactatttcagacatctcctcaaagagggaaccttccaacatctgggaacatttcagggtttatacgaagattatttttacagttgatgctggaagatgagaaagtgacaatgtttcttcagtctccatgtccactgtacaaaggtagaattaatgctactagccacgtcatccagcatccaatgtatggagcaggccacaaattccgtactcttcatttgccagtctcaacaacattatcagatgttcttgacagagtgtcagatactccaagtatcacagctaaattaattagtgaacaaaaagatgacaaagaaaagaaaaaccatgaagagaaagaaaaagttaaagcggaaaatggatttcaagacaattacagtgttgttgttgcctctgggctgaagtctcaatctaaacgtgctgtgtcagctacaccacctcgcccaccatccaggagggggaggacaatacctgataaaataggaagtacttcaggagcagaggctgccaacaaaataattactgtcccagtgtttcacctgtttcacaaactcttggcaggccagccattgccagctgaaatgacacttgcccagcttttaactctcctatatgaccgaaaacttcctcagggttaccgctcaatagatctgactgttaaattgggatcaagagttataacagaccccagtctatcaaaaacagattcttataaaagactacaccctgaaaaagatcatggagacttacttgctagctgtccagaagatgaggctctcactccaggtgatgaatgcatggatgggatactggatgaatctttgcttgaaacctgtccaattcagtcaccattacaagtttttgcaggaatgggtggactggctcttattgctgaaagactacccatgctatatccagaagtaattcaacaggtgagtgctccagttgtaacatctaccactcaggaaaagccgaaggatagcgatcagtttgaatgggtgaccattgaacagtcaggggagttagtttatgaagcaccagaaactgttgcggctgaacctccacctatcaagtcagcagtacagaccatgtctcccatacctgcccattctttggctgcttttggattatttcttcgtcttccgggctatgcggaagtgctactgaaagagagaaaacatgcccagtgccttcttcgattggtattgggagtgacagatgatggagaaggaagtcatattcttcaatctccatcagccaatgtgcttccaacccttcctttccacgtccttcgtagcttgtttagcactacacctttgacaactgatgatggtgtacttctaaggcggatggcattggaaattggagccttacacctcattcttgtctgtctctctgctttgagccaccattccccacgagttccaaactctagcgtgaatcaaactgagccacaggtgtcaagctctcataaccctacatcaacagaagaacaacagttatattgggccaaagggactggctttggaacaggctctacagcttctgggtgggatgtggaacaagccttaactaagcaaaggctggaagaggaacatgttacctgccttctgcaggttcttgccagttacataaatcccgtcagtagtgcggtaaatggagaagctcagtcatctcatgagactagagggcagaacagtaatgcccttccttctgtacttctcgagcttctcagtcagtcctgcctcatcccagccatgtcatcttatctacgaaatgattcagttctggacatggcaagacatgtgccactctatcgggcactgctggaattgcttcgggccattgcttcttgtgctgccatggtgcccctattgttgcccctttctacagagaacggtgaagaggaagaagaacagtcagaatgtcaaacttctgttggtacattgttagccaaaatgaagacctgtgttgatacctataccaaccgtttaagatctaaaagggaaaatgttaaaacaggagtaaaaccagatgcgtctgatcaagaaccagaaggacttactcttttggtaccagacatccaaaagactgctgagatagtttatgcagccaccaccagtttgcggcaagcaaatcaggaaaaaaaactgggtgaatactccaagaaggcggctatgaaacccaaacctttgtcagtattaaagtcacttgaagaaaaatatgtggctgttatgaagaaattacagtttgatacgtttgaaatggtttctgaagatgaagatgggaaattgggatttaaagtaaattaccactacatgtctcaggtgaaaaatgctaatgatgcgaacagtgctgccagagctcgccgccttgcccaggaagctgtgacgctttcaacctcactgcctctgtcttcatcctctagtgtgtttgtacgctgtgatgaggagcgacttgatatcatgaaggttctaataactggtccagcggacaccccttatgcaaatggctgctttgagtttgatgtgtattttcctcaagattatcccagttcaccccctcttgtgaatctagagacaactggtggtcatagcgtgcgattcaatccaaacctttataatgatggcaaggtttgtttaagcatcttaaacacgtggcatggaagaccagaagagaagtggaatcctcagacctcaagctttttgcaagtgttggtgtctgtccagtcccttatattagtagctgagccttattttaatgaaccgggatatgaacggtctagaggcactcccagtggcacacagagttctcgagaatatgatggaaacattcgacaagcaacagttaagtgggcaatgctagaacaaatcagaaacccttcaccatgttttaaagaggtaatacacaaacatttttacttgaaaagagttgagataatggcccaatgtgaggagtggattgcggatatccagcagtacagcagtgataagcgggtaggcaggactatgtctcaccatgcagcagctctcaagcgtcacactgctcagctccgcgaagagttgctgaaacttccctgccctgaaggcttggatcctgacactgacgatgccccagaggtgtgcagagccacaacaggtgctgaggagactctaatgcatgatcaggttaaacccagcagcagcaaagaactccccagtgacttccagttatgagctgcattgatgtggacttcatagacacaaaggcttcgaagcacaagccaaatatgtcaatatttgtatgtaagaaactaattatgtaataggtaatgaaactgaaactatactatgcccttaaggagatccagtttaattcaaggtgatcttttatttacctgtacaggagtgtaaacttttttgtgcttttatttttcaattgtgagaaccactgattggtatgttcaacaaatttgtgtatacaaagaaatggataaatcactgctatataagggaaactaccttaggaaagaatgtttactgaatgtttattttattttattttttttttactatagagtgaggggttgttaacaaagaatatatattggtcattcttacaactactatttaaagtcagcaacttttcactgaatttgatagattttatgtttggccatatcttcatgctcacatttgatttctgaagacctcctacatacacttcaataaaagttaaatggacatactccctcttttttgatttactggtacatttttaaaataataaatctgccataaaatgcattatatctggagacttgcacttgtatggatgaatttattacattcaacatatttaattttatgccttctaattctaagatgcagaaaaaaataaatgaacatgattttattctatgccaacatttgggcctctgaatgtatctgttatttgaatttaagtatttgaaaaggaatggtcaatttgaaagtcattctaaactgattttttttttctaaagggctccttttttcctggactatgtggttttatgactaaagtcacatgtatgtattaaacattgaggctctgtagaggagagaggatgtacctctctggtgctgttacagtacattctgtacctgccatacaggctcattttcatgcaaattcttcctagagccaaataaataaagacttaggtgaattagtatgtcttgtttctaaaaaaaaaaaaa

SEQ ID NO: 111 - protein, 4829 aa, Homo sapiens
MAAAAAAASGPGCSSAAGAGAAGVSEWLVLRDGCMHCDADGLHSLSYHPALNAILAVTSRGTIKVIDGTSGATLQASALSAKPGGQVKCQYISAVDKVIFVDDYAVGCRKDLNGILLLDTALQTPVSKQDDVVQLELPVTEAQQLLSACLEKVDISSTEGYDLFITQLKDGLKNTSHETAANHKVAKWATVTFHLPHHVLKSIASAIVNELKKINQNVAALPVASSVMDRLSYLLPSARPELGVGPGRSVDRSLMYSEANRRETFTSWPHVGYRWAQPDPMAQAGFYHQPASSGDDRAMCFTCSVCLVCWEPTDEPWSEHERHSPNCPFVKGEHTQNVPLSVTLATSPAQFPCTDGTDRISCFGSGSCPHFLAAATKRGKICIWDVSKLMKVHLKFEINAYDPAIVQQLILSGDPSSGVDSRRPTLAWLEDSSSCSDIPKLEGDSDDLLEDSDSEEHSRSDSVTGHTSQKEAMEVSLDITALSILQQPEKLQWEIVANVLEDTVKDLEELGANPCLTNSKSEKTKEKHQEQHNIPFPCLLAGGLLTYKSPATSPISSNSHRSLDGLSRTQGESISEQGSTDNESCTNSELNSPLVRRTLPVLLLYSIKESDEKAGKIFSQMNNIMSKSLHDDGFTVPQIIEMELDSQEQLLLQDPPVTYIQQFADAAANLTSPDSEKWNSVFPKPGTLVQCLRLPKFAEEENLCIDSITPCADGIHLLVGLRTCPVESLSAINQVEALNNLNKLNSALCNRRKGELESNLAVVNGANISVIQHESPADVQTPLIIQPEQRNVSGGYLVLYKMNYATRIVTLEEEPIKIQHIKDPQDTITSLILLPPDILDNREDDCEEPIEDMQLTSKNGFEREKTSDISTLGHLVITTQGGYVKILDLSNFEILAKVEPPKKEGTEEQDTFVSVIYCSGTDRLCACTKGGELHFLQIGGTCDDIDEADILVDGSLSKGIEPSSEGSKPLSNPSSPGISGVDLLVDQPFTLEILTSLVELTRFETLTPRFSATVPPCWVEVQQEQQQRRHPQHLHQQHHGDAAQHTRTWKLQTDSNSWDEHVFELVLPKACMVGHVDFKFVLNSNITNIPQIQVTLLKNKAPGLGKVNALNIEVEQNGKPSLVDLNEEMQHMDVEESQCLRLCPFLEDHKEDILCGPVWLASGLDLSGHAGMLTLTSPKLVKGMAGGKYRSFLIHVKAVNERGTEEICNGGMRPVVRLPSLKHQSNKGYSLASLLAKVAAGKEKSSNVKNENTSGTRKSENLRGCDLLQEVSVTIRRFKKTSISKERVQRCAMLQFSEFHEKLLNTLCRKTDDGQITEHAQSLVLDTLCWLAGVHSNGPGSSKEGNENLLSKTRKFLSDIVRVCFFEAGRSIAHKCARFLALCISNGKCDPCQPAFGPVLLKALLDNMSFLPAATTGGSVYWYFVLLNYVKDEDLAGCSTACASLLTAVSRQLQDRLTPMEALLQTRYGLYSSPFDPVLFDLEMSGSSCKNVYNSSIGVQSDEIDLSDVLSGNGKVSSCTAAEGSFTSLTGLLEVEPLHFTCVSTSDGTRIERDDAMSSFGVTPAVGGLSSGTVGEASTALSSAAQVALQSLSHAMASAEQQLQVLQEKQQQLLKLQQQKAKLEAKLHQTTAAAAAAASAVGPVHNSVPSNPVAAPGFFIHPSDVIPPTPKTTPLFMTPPLTPPNEAVSVVINAELAQLFPGSVIDPPAVNLAAHNKNSNKSRMNPLGSGLALAISHASHFLQPPPHQSIIIERMHSGARRFVTLDFGRPILLTDVLIPTCGDLASLSIDIWTLGEEVDGRRLVVATDISTHSLILHDLIPPPVCRFMKITVIGRYGSTNARAKIPLGFYYGHTYILPWESELKLMHDPLKGEGESANQPEIDQHLAMMVALQEDIQCRYNLACHRLETLLQSIDLPPLNSANNAQYFLRKPDKAVEEDSRVFSAYQDCIQLQLQLNLAHNAVQRLKVALGASRKMLSETSNPEDLIQTSSTEQLRTIIRYLLDTLLSLLHASNGHSVPAVLQSTFHAQACEELFKHLCISGTPKIRLHTGLLLVQLCGGERWWGQFLSNVLQELYNSEQLLIFPQDRVFMLLSCIGQRSLSNSGVLESLLNLLDNLLSPLQPQLPMHRRTEGVLDIPMISWVVMLVSRLLDYVATVEDEAAAAKKPLNGNQWSFINNNLHTQSLNRSSKGSSSLDRLYSRKIRKQLVHHKQQLNLLKAKQKALVEQMEKEKIQSNKGSSYKLLVEQAKLKQATSKHFKDLIRLRRTAEWSRSNLDTEVTTAKESPEIEPLPFTLAHERCISVVQKLVLFLLSMDFTCHADLLLFVCKVLARIANATRPTIHLCEIVNEPQLERLLLLLVGTDFNRGDISWGGAWAQYSLTCMLQDILAGELLAPVAAEAMEEGTVGDDVGATAGDSDDSLQQSSVQLLETIDEPLTHDITGAPPLSSLEKDKEIDLELLQDLMEVDIDPLDIDLEKDPLAAKVFKPISSTWYDYWGADYGTYNYNPYIGGLGIPVAKPPANTEKNGSQTVSVSVSQALDARLEVGLEQQAELMLKMMSTLEADSILQALTNTSPTLSQSPTGTDDSLLGGLQAANQTSQLIIQLSSVPMLNVCFNKLFSMLQVHHVQLESLLQLWLTLSLNSSSTGNKENGADIFLYNANRIPVISLNQASITSFLTVLAWYPNTLLRTWCLVLHSLTLMTNMQLNSGSSSAIGTQESTAHLLVSDPNLIHVLVKFLSGTSPHGTNQHSPQVGPTATQAMQEFLTRLQVHLSSTCPQIFSEFLLKLIHILSTERGAFQTGQGPLDAQVKLLEFTLEQNFEVVSVSTISAVIESVTFLVHHYITCSDKVMSRSGSDSSVGARACFGGLFANLIRPGDAKAVCGEMTRDQLMFDLLKLVNILVQLPLSGNREYSARVSVTTNTTDSVSDEEKVSGGKDGNGSSTSVQGSPAYVADLVLANQQIMSQILSALGLCNSSAMAMIIGASGLHLTKHENFHGGLDAISVGDGLFTILTTLSKKASTVHMMLQPILTYMACGYMGRQGSLATCQLSEPLLWFILRVLDTSDALKAFHDMGGVQLICNNMVTSTRAIVNTARSMVSTIMKFLDSGPNKAVDSTLKTRILASEPDNAEGIHNFAPLGTITSSSPTAQPAEVLLQATPPHRRARSAAWSYIFLPEEAWCDLTIHLPAAVLLKEIHIQPHLASLATCPSSVSVEVSADGVNMLPLSTPVVTSGLTYIKIQLVKAEVASAVCLRLHRPRDASTLGLSQIKLLGLTAFGTTSSATVNNPFLPSEDQVSKTSIGWLRLLHHCLTHISDLEGMMASAAAPTANLLQTCAALLMSPYCGMHSPNIEVVLVKIGLQSTRIGLKLIDILLRNCAASGSDPTDLNSPLLFGRLNGLSSDSTIDILYQLGTTQDPGTKDRIQALLKWVSDSARVAAMKRSGRMNYMCPNSSTVEYGLLMPSPSHLHCVAAILWHSYELLVEYDLPALLDQELFELLFNWSMSLPCNMVLKKAVDSLLCSMCHVHPNYFSLLMGWMGITPPPVQCHHRLSMTDDSKKQDLSSSLTDDSKNAQAPLALTESHLATLASSSQSPEAIKQLLDSGLPSLLVRSLASFCFSHISSSESIAQSIDISQDKLRRHHVPQQCNKMPITADLVAPILRFLTEVGNSHIMKDWLGGSEVNPLWTALLFLLCHSGSTSGSHNLGAQQTSARSASLSSAATTGLTTQQRTAIENATVAFFLQCISCHPNNQKLMAQVLCELFQTSPQRGNLPTSGNISGFIRRLFLQLMLEDEKVTMFLQSPCPLYKGRINATSHVIQHPMYGAGHKFRTLHLPVSTTLSDVLDRVSDTPSITAKLISEQKDDKEKKNHEEKEKVKAENGFQDNYSVVVASGLKSQSKRAVSATPPRPPSRRGRTIPDKIGSTSGAEAANKIITVPVFHLFHKLLAGQPLPAEMTLAQLLTLLYDRKLPQGYRSIDLTVKLGSRVITDPSLSKTDSYKRLHPEKDHGDLLASCPEDEALTPGDECMDGILDESLLETCPIQSPLQVFAGMGGLALIAERLPMLYPEVIQQVSAPVVTSTTQEKPKDSDQFEWVTIEQSGELVYEAPETVAAEPPPIKSAVQTMSPIPAHSLAAFGLFLRLPGYAEVLLKERKHAQCLLRLVLGVTDDGEGSHILQSPSANVLPTLPFHVLRSLFSTTPLTTDDGVLLRRMALEIGALHLILVCLSALSHHSPRVPNSSVNQTEPQVSSSHNPTSTEEQQLYWAKGTGFGTGSTASGWDVEQALTKQRLEEEHVTCLLQVLASYINPVSSAVNGEAQSSHETRGQNSNALPSVLLELLSQSCLIPAMSSYLRNDSVLDMARHVPLYRALLELLRAIASCAAMVPLLLPLSTENGEEEEEQSECQTSVGTLLAKMKTCVDTYTNRLRSKRENVKTGVKPDASDQEPEGLTLLVPDIQKTAEIVYAATTSLRQANQEKKLGEYSKKAAMKPKPLSVLKSLEEKYVAVMKKLQFDTFEMVSEDEDGKLGFKVNYHYMSQVKNANDANSAARARRLAQEAVTLSTSLPLSSSSSVFVRCDEERLDIMKVLITGPADTPYANGCFEFDVYFPQDYPSSPPLVNLETTGGHSVRFNPNLYNDGKVCLSILNTWHGRPEEKWNPQTSSFLQVLVSVQSLILVAEPYFNEPGYERSRGTPSGTQSSREYDGNIRQATVKWAMLEQIRNPSPCFKEVIHKHFYLKRVEIMAQCEEWIADIQQYSSDKRVGRTMSHHAAALKRHTAQLREELLKLPCPEGLDPDTDDAPEVCRATTGAEETLMHDQVKPSSSKELPSDFQL

SEQ ID NO: 112 - DNA, 3386 bp, Homo sapiens
  CDS (114)..(1397)
gccgcggccagctccggcgggcagggggggcgctggagcgcagcgcagcgcagccccatcagtccgcaaagcggaccgagctggaagtcgagcgctgccgcgggaggcgggcgatgggggcaggtgccaccggccgcgccatggacgggccgcgcctgctgctgttgctgcttctgggggtgtcccttggaggtgccaaggaggcatgccccacaggcctgtacacacacagcggtgagtgctgcaaagcctgcaacctgggcgagggtgtggcccagccttgtggagccaaccagaccgtgtgtgagccctgcctggacagcgtgacgttctccgacgtggtgagcgcgaccgagccgtgcaagccgtgcaccgagtgcgtggggctccagagcatgtcggcgccgtgcgtggaggccgacgacgccgtgtgccgctgcgcctacggctactaccaggatgagacgactgggcgctgcgaggcgtgccgcgtgtgcgaggcgggctcgggcctcgtgttctcctgccaggacaagcagaacaccgtgtgcgaggagtgccccgacggcacgtattccgacgaggccaaccacgtggacccgtgcctgccctgcaccgtgtgcgaggacaccgagcgccagctccgcgagtgcacacgctgggccgacgccgagtgcgaggagatccctggccgttggattacacggtccacacccccagagggctcggacagcacagcccccagcacccaggagcctgaggcacctccagaacaagacctcatagccagcacggtggcaggtgtggtgaccacagtgatgggcagctcccagcccgtggtgacccgaggcaccaccgacaacctcatccctgtctattgctccatcctggctgctgtggttgtgggccttgtggcctacatagccttcaagaggtggaacagctgcaagcagaacaagcaaggagccaacagccggccagtgaaccagacgcccccaccagagggagaaaaactccacagcgacagtggcatctccgtggacagccagagcctgcatgaccagcagccccacacgcagacagcctcgggccaggccctcaagggtgacggaggcctctacagcagcctgcccccagccaagcgggaggaggtggagaagcttctcaacggctctgcgggggacacctggcggcacctggcgggcgagctgggctaccagcccgagcacatagactcctttacccatgaggcctgccccgttcgcgccctgcttgcaagctgggccacccaggacagcgccacactggacgccctcctggccgccctgcgccgcatccagcgagccgacctcgtggagagtctgtgcagtgagtccactgccacatccccggtgtgagcccaaccggggagcccccgccccgccccacattccgacaaccgatgctccagccaacccctgtggagcccgcacccccaccctttggggggggcccgcctggcagaactgagctcctctgggcaggacctcagagtccaggccccaaaaccacagccctgtcagtgcagcccgtgtggccccttcacttctgaccacacttcctgtccagagagagaagtgcccctgctgcctccccaaccctgcccctgccccgtcaccatctcaggccacctgcccccttctcccacactgctaggtgggccagcccctcccaccacagcaggtgtcatatatggggggccaacaccagggatggtactagggggaagtgacaaggccccagagactcagagggaggaatcgaggaaccagagccatggactctacactgtgaacttggggaacaagggtggcatcccagtggcctcaaccctccctcagcccctcttgccccccaccccagcctaagatgaagaggatcggaggcttgtcagagctgggaggggttttcgaagctcagcccacccccctcattttggatataggtcagtgaggcccagggagaggccatgattcgcccaaagccagacagcaacggggaggccaagtgcaggctggcaccgccttctctaaatgaggggcctcaggtttgcctgagggcgaggggagggtggcaggtgaccttctgggaaatggcttgaagccaagtcagctttgccttccacgctgtctccagacccccaccccttccccactgcctgcccacccgtggagatgggatgcttgcctagggcctggtccatgatggagtcaggtttggggttcgtggaaagggtgctgcttccctctgcctgtccctctcaggcatgcctgtgtgacatcagtggcatggctccagtctgctgccctccatcccgacatggacccggagctaacactggcccctagaatcagcctaggggtcagggaccaaggacccctcaccttgcaacacacagacacacgcacacacacacacaggaggagaaatctcacttttctccatgagttttttctcttgggctgagactggatactgcccggggcagctgccagagaagcatcggagggaattgaggtctgctcggccgtcttcactcgcccccgggtttggcgggccaaggactgccgaccgaggctggagctggcgtctgtcttcaagggcttacacgtggaggaatgctcccccatcctccccttccctgcaaacatggggttggctgggcccagaaggttgcgatgaagaaaagcgggccagtgtgggaatgcggcaagaaggaattgacttcgactgtgacctgtggggatttctcccagctctagacaaccctgcaaaggactgttttttcctgagcttggccagaagggggccatgaggcctcagtggactttccaccccctccctggcctgttctgttttgcctgaagttggagtgagtgtggctcccctctatttagcatgacaagccccaggcaggctgtgcgctgacaaccaccgctccccagcccagggttcccccagccctgtggaagggactaggagcactgtagtaaatggcaattctttgacctcaacctgtgatgaggggaggaaactcacctgctggcccctcacctgggcacctggggagtgggacagagtctgggtgtatttattttcctccccagcaggtggggagggggtttggtggcttgcaagtatgttttagcatgtgtttggttctggggcccctttttactccccttgagctgagatggaacccttttggcccccagctgggggccatgagctccagacccccagcaaccctcctatcacctcccctccttgcctcctgtgtaatcatttcttgggccctcctgaaacttacacacaaaacgttaagtgatgaacattaaatagcaaag

SEQ ID NO: 113 - protein, 427 aa, Homo sapiens
MGAGATGRAMDGPRLLLLLLLGVSLGGAKEACPTGLYTHSGECCKACNLGEGVAQPCGANQTVCEPCLDSVTFSDVVSATEPCKPCTECVGLQSMSAPCVEADDAVCRCAYGYYQDETTGRCEACRVCEAGSGLVFSCQDKQNTVCEECPDGTYSDEANHVDPCLPCTVCEDTERQLRECTRWADAECEEIPGRWITRSTPPEGSDSTAPSTQEPEAPPEQDLIASTVAGVVTTVMGSSQPVVTRGTTDNLIPVYCSILAAVVVGLVAYIAFKRWNSCKQNKQGANSRPVNQTPPPEGEKLHSDSGISVDSQSLHDQQPHTQTASGQALKGDGGLYSSLPPAKREEVEKLLNGSAGDTWRHLAGELGYQPEHIDSFTHEACPVRALLASWATQDSATLDALLAALRRIQRADLVESLCSESTATSPV

SEQ ID NO: 114 - DNA, 3399 bp, Homo sapiens
  CDS (143)..(2539)
ctccccgcgccccgcggcgcgcggccagtgcgcaggcgcggcggccgatgcgagtgtgtatgtgcgggcgagaagatggcggcggcgggggaagcagcgtgagcagccggaggatcgcggagtcccaatgaaacgggcagccatggccctccacagcccgcagtatatttttggagattttagccctgatgaattcaatcaattctttgtgactcctcgatcttcagttgagcttcctccatacagtggaacagttctgtgtggcacacaggctgtggataaactacctgatggacaagaatatcagagaattgagtttggtgtcgatgaagtcattgaacccagtgacactttgccgagaacccccagctacagtatttcaagcacactgaaccctcaggcccctgaatttattctcggttgtacagcttccaaaataacccctgatggtatcactaaagaagcaagctatggctccatcgactgccagtacccaggctctgccctcgctttggatggaagttctaatgtggaggcggaagttttggaaaatgatggtgtctcaggtggtcttggacaaagggagcgtaaaaagaagaaaaagcggccacctggatattacagctatttgaaagatggtggcgatgatagtatctccacagaagccctggtcaatggccatgccaattcagcagtcccgaacagtgtcagtgcagaggatgcagaatttatgggtgacatgcccccgtcagttacgcccaggacttgtaacagcccccagaactccacagactctgtcagtgacattgtgcctgacagtcctttccccggagcactcggcagtgacaccaggactgcagggcagccagaggggggccccggggctgattttggtcagtcctgcttccctgcagaggctggcagagacaccctgtcaaggacagctggggctcagccctgcgttggtaccgatactactgaaaaccttggagttgctaatggacaaatacttgaatcctcgggtgagggcacagctaccaacggggtggagttgcacaccacggaaagcatagacttggacccaaccaaacccgagagtgcatcacctcctgctgacggcacgggctctgcatcaggcacccttcctgtcagccagcccaagtcctgggccagcctctttcatgattctaagccctcttcctcctcgccggtggcctatgtggaaactaagtattcccctcccgccatatctcccctggtttctgaaaagcaggttgaagtcaaagaagggcttgttccggtttcagaggatcctgtagccataaagattgcagagttgctggagaatgtaaccctaatccataaaccagtgtcgttgcaaccccgtgggctgatcaataaagggaactggtgctacattaatgctacactgcaggcattggttgcttgcccgccgatgtaccacctgatgaagttcattcctctgtattccaaagtgcaaaggccttgtacgtcaacacccatgatagacagctttgttcggctaatgaatgagttcactaatatgccagtacctccaaaaccccgacaagctcttggagataaaatcgtgagggatattcgccctggagctgcctttgagcccacatatatttacagactcctgacagttaacaagtcaagcctgtctgaaaagggtcgacaagaagatgctgaggaatacttaggcttcattctaaatggacttcatgaggaaatgttgaacctaaagaagcttctctcaccaagtaatgaaaaacttacgatttccaacggccccaaaaaccactcggtcaatgaagaagagcaggaagaacaaggtgaaggaagcgaggatgaatgggaacaagtgggcccccggaacaagacttccgtcacccgccaggcggattttgttcagactccaatcaccggcatttttggtggacacatcaggtctgtggtttaccagcagagttcaaaagaatctgccactttgcagccatttttcacgttgcagttggatatccagtcagacaagatacgcacagtccaggatgcactggagagcttggtggcaagagaatctgtccaaggttataccacaaaaaccaaacaagaggttgagataagtcgaagagtgactctggaaaaactccctcctgtcctcgtgctgcacctgaaacgattcgtttatgagaagactggtgggtgccagaagcttatcaaaaatattgaatatcctgtggacttggaaattagtaaagaactgctttctccaggggttaaaaataagaattttaaatgccaccgaacctatcggctctttgcagtggtctaccatcacggcaacagtgcgacgggcggccattacactacagacgtcttccagatcggtctgaatggctggctgcgcatcgatgaccagacagtcaaggtgatcaaccagtaccaggtggtgaaaccaactgctgaacgcacagcctacctcctgtattaccgccgagtggacctgctgtaaaccctgtgtgcgctgtgtgtgcgcccagtgcccgcttcgtaggacaccacctcacactcacttcccgcctctctttagtggctctttagagagaaactctttctccctttgcaaaaatgggctagaatgaaaaggagatgccttggggttcgtgcacaacacagcttctgttgactctaacttccaaatcaaaatcatttggttgaaacagactgttgcttgattttagaaaatacacaaaaacccatatttctgaaataatgctgattcctgagataagaaagtggatttgatccccagtctcattgcttagtagaataaatcctgcaccagcaacaacacttgtaaatttgtgaaaatgaattttatctttccttaaaaaagaaattttttaatccatcacacttttcttccctaccctttagtttttgataaatgataaaaatgagccagttatcaaagaagaactagttcttacttcaaaagaaaaataaacataaaaaataagttgctggttcctaacaggaaaaattttaataattgtactgagagaaactgcttacgtacacattgcagatcaaatatttggagttaaaatgttagtctacatagatgggtgattgtaactttattgccattaaaagatttcaaattgcattcatgcttctgtgtacacataatgaaaaatgggcaaataatgaagatctctccttcagtctgctctgtttaattctgctgtctgctcttctctaatgctgcgtccctaattgtacacagtttagtgatatctaggagtataaagttgtcgcccatcaataaaaatcacaaagttggtttaaaaaaaaaaaaaaaaaaaaaaa

SEQ ID NO: 115 - protein, 798 aa, Homo sapiens
MALHSPQYIFGDFSPDEFNQFFVTPRSSVELPPYSGTVLCGTQAVDKLPDGQEYQRIEFGVDEVIEPSDTLPRTPSYSISSTLNPQAPEFILGCTASKITPDGITKEASYGSIDCQYPGSALALDGSSNVEAEVLENDGVSGGLGQRERKKKKKRPPGYYSYLKDGGDDSISTEALVNGHANSAVPNSVSAEDAEFMGDMPPSVTPRTCNSPQNSTDSVSDIVPDSPFPGALGSDTRTAGQPEGGPGADFGQSCFPAEAGRDTLSRTAGAQPCVGTDTTENLGVANGQILESSGEGTATNGVELHTTESIDLDPTKPESASPPADGTGSASGTLPVSQPKSWASLFHDSKPSSSSPVAYVETKYSPPAISPLVSEKQVEVKEGLVPVSEDPVAIKIAELLENVTLIHKPVSLQPRGLINKGNWCYINATLQALVACPPMYHLMKFIPLYSKVQRPCTSTPMIDSFVRLMNEFTNMPVPPKPRQALGDKIVRDIRPGAAFEPTYIYRLLTVNKSSLSEKGRQEDAEEYLGFILNGLHEEMLNLKKLLSPSNEKLTISNGPKNHSVNEEEQEEQGEGSEDEWEQVGPRNKTSVTRQADFVQTPITGIFGGHIRSVVYQQSSKESATLQPFFTLQLDIQSDKIRTVQDALESLVARESVQGYTTKTKQEVEISRRVTLEKLPPVLVLHLKRFVYEKTGGCQKLIKNIEYPVDLEISKELLSPGVKNKNFKCHRTYRLFAVVYHHGNSATGGHYTTDVFQIGLNGWLRIDDQTVKVINQYQVVKPTAERTAYLLYYRRVDLL

SEQ ID NO: 116 - DNA, 3283 bp, Homo sapiens
  CDS (197)..(1351)
cccgccagctcgcggagccgctctgccccgcgccctagcccgcgcctgcagcccgcccaggcggagtcagcccgcgctccgcccgccgcgatccgagctcggaggttcggactccgggctcgccgccccccgggccggctccgcgccccgcactcccggcgcccagcgccccgcgccccggcgggcggagcgcaccatgccgcagctggactccggcgggggcggcgcgggcggcggcgacgacctcggcgcgccggacgagctgctggccttccaggatgaaggcgaggagcaggacgacaagagccgcgacagcgccgccggtcccgagcgcgacctggccgagctcaagtcgtcgctcgtgaacgagtccgagggcgcggccggcggcgcagggatcccgggggtcccgggggccggcgccggggcccgcggcgaggccgaggctctcgggcgggaacacgctgcgcagagactcttcccggacaaacttccagagcccctggaggacggcctgaaggccccggagtgcaccagcggcatgtacaaagagaccgtctactccgccttcaatctgctcatgcattacccacccccctcgggagcagggcagcacccccagccgcagcccccgctgcacaaggccaatcagcccccccacggtgtcccccaactctctctctacgaacatttcaacagcccacatcccacccctgcacctgcggacatcagccagaagcaagttcacaggcctctgcagacccctgacctctctggcttctactccctgacctcaggcagcatggggcagctcccccacactgtgagctggttcacccacccatccttgatgctaggttctggtgtacctggtcacccagcagccatcccccacccggccattgtgcccccctcagggaagcaggagctgcagcccttcgaccgcaacctgaagacacaagcagagtccaaggcagagaaggaggccaagaagccaaccatcaagaagcccctcaatgccttcatgctgtacatgaaggagatgagagccaaggtcattgcagagtgcacacttaaggagagcgctgccatcaaccagatcctgggccgcaggtggcacgcgctgtcgcgagaagagcaggccaagtactatgagctggcccgcaaggagaggcagctgcacatgcagctatacccaggctggtcagcgcgggacaactacgggaagaagaagaggcggtcgagggaaaagcaccaagaatccaccacaggaggaaaaagaaatgcattcggtacttacccggagaaggccgctgccccagccccgttccttccgatgacagtgctctaggctgccccgggtccccagctccccaggactcaccctcataccatctgctgccccgcttccccacagaactgcttactagccctgcggagccggcacctacatccccaggtctctccactgctctcagcctcccaaccccagggcccccacaggccccccgcagcaccctgcagagcacacaggtacagcaacaggaatctcagagacaggtggcctagcaggcacaggacacctggccgcctccaggagcctaccccctgaaagtgacagagacccagatctcatggaaactggccaggggtcctgttaacgtcatctcagggtccagaccctgaagatttcagaggctgcaggacttctgcctgaacctggggtcatcgattcaaactgctccaagtggtgggaatcagatctgtcttgatgtgtcatctaattaagggaatcccttgtacctatggctgcctgcatctattctttgtaccatctgtcttgccagccagaagcctctgcctccctagcttttctgctataggtcagagatgggctgaactgagcctagctaccttctctacccatctcccccatcccccactgccacaccctccccattcagacacttcatggaccaagaatgagctggtttgtcaaacaacatgtgagcatggtcacaagcacaaagctcaagatgacagctcttctaaggaaatggagaagctctgtttataaaaacaaaaacaaaaccagctgctactcataagttggaccagaggaagccccttactatgatctcaggagcttgcaagaagcaggaaggggaatggaataggttaagtttaggcctatcaacctaagcaacagaaataatctgacactaccttatcaggcaaattggggaggggagggtgtatctagctctagttcaaattatttggaagtgttccctgagaaacccaccagcctaagaagctctggccccaggcttgtcactagcagctgcagtcaacagttcaaagaagtcatggcccaaatccagtgtgcacccctccccattcacagagcctttttcacaattccatttccagttcatctatggcagtccagccagctcctgggcagcttgagagggcaaacccaaaacctcatgacagccagagcctgtctttcagcattcagtccgcctggccggctccagtttccccatggggctgcgggacagaggaccattacaactagatcaaggagcccagaaaacctccagtagtggacaacaggttttcaccatagcctacgttaacccatttttgagccaagcttcaaccctcagccttgaaaaacaagtctttaatttaatttttgttttttgcctaaatccaaagaaaaagggctgccgggccaggcgcggtggctcacgcctgtaatcccagcactttggcaggccgaggcaggtggatcacctgacgtcagtagtttgagaccagcctggccaacatggtgaaaccctgtatctactaaaaatacaaaaattagccggacgtggtggtgcgcgcatgtaatcccagctactcgggaggctgaggcggaagaatcacttgaacccgggaggcggaggttccagtgagccgagatggcgctattgcactccagtctgggtaacagggagactgcatctcaaaaaaaaaaaaaaaaaaaaaaaagggctgtccatgtattcacacacccctcaaaaaaagcctttagttcctactttagccactggtttctcagaatccaaagatcacatattctagtgtaacactgcaagaagtcttgagaaaaagattattgtagtgttcaaaatatttttgtattgttaatgcatcatcatagaaaaacttttaaacatgagaataaagatactttttactgggtttgtttttcaaagcctgaaaaaaa

SEQ ID NO: 117 - protein, 384 aa, Homo sapiens
MPQLDSGGGGAGGGDDLGAPDELLAFQDEGEEQDDKSRDSAAGPERDLAELKSSLVNESEGAAGGAGIPGVPGAGAGARGEAEALGREHAAQRLFPDKLPEPLEDGLKAPECTSGMYKETVYSAFNLLMHYPPPSGAGQHPQPQPPLHKANQPPHGVPQLSLYEHFNSPHPTPAPADISQKQVHRPLQTPDLSGFYSLTSGSMGQLPHTVSWFTHPSLMLGSGVPGHPAAIPHPAIVPPSGKQELQPFDRNLKTQAESKAEKEAKKPTIKKPLNAFMLYMKEMRAKVIAECTLKESAAINQILGRRWHALSREEQAKYYELARKERQLHMQLYPGWSARDNYGKKKRRSREKHQESTTGGKRNAFGTYPEKAAAPAPFLPMTVL

SEQ ID NO: 118 - DNA, 2821 bp, Homo sapiens
  CDS (80)..(889)
gcccaggtgactgactaatccgccgccttcaggagacagaattggccaaggcctgaaggccccggagtgcaccagcggcatgtacaaagagaccgtctactccgccttcaatctgctcatgcattacccacccccctcgggagcagggcagcacccccagccgcagcccccgctgcacaaggccaatcagcccccccacggtgtcccccaactctctctctacgaacatttcaacagcccacatcccacccctgcacctgcggacatcagccagaagcaagttcacaggcctctgcagacccctgacctctctggcttctactccctgacctcaggcagcatggggcagctcccccacactgtgagctggttcacccacccatccttgatgctaggttctggtgtacctggtcacccagcagccatcccccacccggccattgtgcccccctcagggaagcaggagctgcagcccttcgaccgcaacctgaagacacaagcagagtccaaggcagagaaggaggccaagaagccaaccatcaagaagcccctcaatgccttcatgctgtacatgaaggagatgagagccaaggtcattgcagagtgcacacttaaggagagcgctgccatcaaccagatcctgggccgcaggtggcacgcgctgtcgcgagaagagcaggccaagtactatgagctggcccgcaaggagaggcagctgcacatgcagctatacccaggctggtcagcgcgggacaactacgggaagaagaagaggcggtcgagggaaaagcaccaagaatccaccacaggaggaaaaagaaatgcattcggtacttacccggagaaggccgctgccccagccccgttccttccgatgacagtgctctaggctgccccgggtccccagctccccaggactcaccctcataccatctgctgccccgcttccccacagaactgcttactagccctgcggagccggcacctacatccccaggtctctccactgctctcagcctcccaaccccagggcccccacaggccccccgcagcaccctgcagagcacacaggtacagcaacaggaatctcagagacaggtggcctagcaggcacaggacacctggccgcctccaggagcctaccccctgaaagtgacagagacccagatctcatggaaactggccaggggtcctgttaacgtcatctcagggtccagaccctgaagatttcagaggctgcaggacttctgcctgaacctggggtcatcgattcaaactgctccaagtggtgggaatcagatctgtcttgatgtgtcatctaattaagggaatcccttgtacctatggctgcctgcatctattctttgtaccatctgtcttgccagccagaagcctctgcctccctagcttttctgctataggtcagagatgggctgaactgagcctagctaccttctctacccatctcccccatcccccactgccacaccctccccattcagacacttcatggaccaagaatgagctggtttgtcaaacaacatgtgagcatggtcacaagcacaaagctcaagatgacagctcttctaaggaaatggagaagctctgtttataaaaacaaaaacaaaaccagctgctactcataagttggaccagaggaagccccttactatgatctcaggagcttgcaagaagcaggaaggggaatggaataggttaagtttaggcctatcaacctaagcaacagaaataatctgacactaccttatcaggcaaattggggaggggagggtgtatctagctctagttcaaattatttggaagtgttccctgagaaacccaccagcctaagaagctctggccccaggcttgtcactagcagctgcagtcaacagttcaaagaagtcatggcccaaatccagtgtgcacccctccccattcacagagcctttttcacaattccatttccagttcatctatggcagtccagccagctcctgggcagcttgagagggcaaacccaaaacctcatgacagccagagcctgtctttcagcattcagtccgcctggccggctccagtttccccatggggctgcgggacagaggaccattacaactagatcaaggagcccagaaaacctccagtagtggacaacaggttttcaccatagcctacgttaacccatttttgagccaagcttcaaccctcagccttgaaaaacaagtctttaatttaatttttgttttttgcctaaatccaaagaaaaagggctgccgggccaggcgcggtggctcacgcctgtaatcccagcactttggcaggccgaggcaggtggatcacctgacgtcagtagtttgagaccagcctggccaacatggtgaaaccctgtatctactaaaaatacaaaaattagccggacgtggtggtgcgcgcatgtaatcccagctactcgggaggctgaggcggaagaatcacttgaacccgggaggcggaggttccagtgagccgagatggcgctattgcactccagtctgggtaacagggagactgcatctcaaaaaaaaaaaaaaaaaaaaaaaagggctgtccatgtattcacacacccctcaaaaaaagcctttagttcctactttagccactggtttctcagaatccaaagatcacatattctagtgtaacactgcaagaagtcttgagaaaaagattattgtagtgttcaaaatatttttgtattgttaatgcatcatcatagaaaaacttttaaacatgagaataaagatactttttactgggtttgtttttcaaagcctgaaaaaaa

SEQ ID NO: 119 - protein, 269 aa, Homo sapiens
MYKETVYSAFNLLMHYPPPSGAGQHPQPQPPLHKANQPPHGVPQLSLYEHFNSPHPTPAPADISQKQVHRPLQTPDLSGFYSLTSGSMGQLPHTVSWFTHPSLMLGSGVPGHPAAIPHPAIVPPSGKQELQPFDRNLKTQAESKAEKEAKKPTIKKPLNAFMLYMKEMRAKVIAECTLKESAAINQILGRRWHALSREEQAKYYELARKERQLHMQLYPGWSARDNYGKKKRRSREKHQESTTGGKRNAFGTYPEKAAAPAPFLPMTVL

SEQ ID NO: 120 - DNA, 1254 bp, Homo sapiens
  CDS (80)..(889)
gcccaggtgactgactaatccgccgccttcaggagacagaattggccaaggcctgaaggccccggagtgcaccagcggcatgtacaaagagaccgtctactccgccttcaatctgctcatgcattacccacccccctcgggagcagggcagcacccccagccgcagcccccgctgcacaaggccaatcagcccccccacggtgtcccccaactctctctctacgaacatttcaacagcccacatcccacccctgcacctgcggacatcagccagaagcaagttcacaggcctctgcagacccctgacctctctggcttctactccctgacctcaggcagcatggggcagctcccccacactgtgagctggttcacccacccatccttgatgctaggttctggtgtacctggtcacccagcagccatcccccacccggccattgtgcccccctcagggaagcaggagctgcagcccttcgaccgcaacctgaagacacaagcagagtccaaggcagagaaggaggccaagaagccaaccatcaagaagcccctcaatgccttcatgctgtacatgaaggagatgagagccaaggtcattgcagagtgcacacttaaggagagcgctgccatcaaccagatcctgggccgcaggtggcacgcgctgtcgcgagaagagcaggccaagtactatgagctggcccgcaaggagaggcagctgcacatgcagctatacccaggctggtcagcgcgggacaactacgggaagaagaagaggcggtcgagggaaaagcaccaagaatccaccacagagacaaactggcccagagaactcaaggatggtaatggacaagagtcactgtccatgtcttcttcctctagcccagcttgaggactgggatggctgggcaaggaagccataggcattgcggccccttgccttggtgcagatgtgagtcccacaaacacatctggagaagctcaaaggccgggactgggagatgactcccttggaagacaggagagatgactcccttggaagacagatgacagcccataggcctagtgacaaaaggcccctttccgaccttgtggctgttctgggaactgcacctgtcctaggtctgggccagaccaagcagaatggcagtctgaggacactgacttaccacccaagtcccaggaagagaggacaaggaatcagccaggcctgtgcaaaggcagcattttttggttgtggagtatgactatgaattc

SEQ ID NO: 121 - protein, 269 aa, Homo sapiens
MYKETVYSAFNLLMHYPPPSGAGQHPQPQPPLHKANQPPHGVPQLSLYEHFNSPHPTPAPADISQKQVHRPLQTPDLSGFYSLTSGSMGQLPHTVSWFTHPSLMLGSGVPGHPAAIPHPAIVPPSGKQELQPFDRNLKTQAESKAEKEAKKPTIKKPLNAFMLYMKEMRAKVIAECTLKESAAINQILGRRWHALSREEQAKYYELARKERQLHMQLYPGWSARDNYGKKKRRSREKHQESTTETNWPRELKDGNGQESLSMSSSSSPA

SEQ ID NO: 122 - DNA, 2917 bp, Homo sapiens
  CDS (80)..(886)
gcccaggtgactgactaatccgccgccttcaggagacagaattggccaaggcctgaaggccccggagtgcaccagcggcatgtacaaagagaccgtctactccgccttcaatctgctcatgcattacccacccccctcgggagcagggcagcacccccagccgcagcccccgctgcacaaggccaatcagcccccccacggtgtcccccaactctctctctacgaacatttcaacagcccacatcccacccctgcacctgcggacatcagccagaagcaagttcacaggcctctgcagacccctgacctctctggcttctactccctgacctcaggcagcatggggcagctcccccacactgtgagctggttcacccacccatccttgatgctaggttctggtgtacctggtcacccagcagccatcccccacccggccattgtgcccccctcagggaagcaggagctgcagcccttcgaccgcaacctgaagacacaagcagagtccaaggcagagaaggaggccaagaagccaaccatcaagaagcccctcaatgccttcatgctgtacatgaaggagatgagagccaaggtcattgcagagtgcacacttaaggagagcgctgccatcaaccagatcctgggccgcaggtggcacgcgctgtcgcgagaagagcaggccaagtactatgagctggcccgcaaggagaggcagctgcacatgcagctatacccaggctggtcagcgcgggacaactacgggaagaagaagaggcggtcgagggaaaagcaccaagaatccaccacagaccctggctcgcctaagaaatgccgtgctcgctttggcctcaaccagcagacggattggtgtggtccgtgcagataactctcttcactattcctaggaggaaaaagaaatgcattcggtacttacccggagaaggccgctgccccagccccgttccttccgatgacagtgctctaggctgccccgggtccccagctccccaggactcaccctcataccatctgctgccccgcttccccacagaactgcttactagccctgcggagccggcacctacatccccaggtctctccactgctctcagcctcccaaccccagggcccccacaggccccccgcagcaccctgcagagcacacaggtacagcaacaggaatctcagagacaggtggcctagcaggcacaggacacctggccgcctccaggagcctaccccctgaaagtgacagagacccagatctcatggaaactggccaggggtcctgttaacgtcatctcagggtccagaccctgaagatttcagaggctgcaggacttctgcctgaacctggggtcatcgattcaaactgctccaagtggtgggaatcagatctgtcttgatgtgtcatctaattaagggaatcccttgtacctatggctgcctgcatctattctttgtaccatctgtcttgccagccagaagcctctgcctccctagcttttctgctataggtcagagatgggctgaactgagcctagctaccttctctacccatctcccccatcccccactgccacaccctccccattcagacacttcatggaccaagaatgagctggtttgtcaaacaacatgtgagcatggtcacaagcacaaagctcaagatgacagctcttctaaggaaatggagaagctctgtttataaaaacaaaaacaaaaccagctgctactcataagttggaccagaggaagccccttactatgatctcaggagcttgcaagaagcaggaaggggaatggaataggttaagtttaggcctatcaacctaagcaacagaaataatctgacactaccttatcaggcaaattggggaggggagggtgtatctagctctagttcaaattatttggaagtgttccctgagaaacccaccagcctaagaagctctggccccaggcttgtcactagcagctgcagtcaacagttcaaagaagtcatggcccaaatccagtgtgcacccctccccattcacagagcctttttcacaattccatttccagttcatctatggcagtccagccagctcctgggcagcttgagagggcaaacccaaaacctcatgacagccagagcctgtctttcagcattcagtccgcctggccggctccagtttccccatggggctgcgggacagaggaccattacaactagatcaaggagcccagaaaacctccagtagtggacaacaggttttcaccatagcctacgttaacccatttttgagccaagcttcaaccctcagccttgaaaaacaagtctttaatttaatttttgttttttgcctaaatccaaagaaaaagggctgccgggccaggcgcggtggctcacgcctgtaatcccagcactttggcaggccgaggcaggtggatcacctgacgtcagtagtttgagaccagcctggccaacatggtgaaaccctgtatctactaaaaatacaaaaattagccggacgtggtggtgcgcgcatgtaatcccagctactcgggaggctgaggcggaagaatcacttgaacccgggaggcggaggttccagtgagccgagatggcgctattgcactccagtctgggtaacagggagactgcatctcaaaaaaaaaaaaaaaaaaaaaaaagggctgtccatgtattcacacacccctcaaaaaaagcctttagttcctactttagccactggtttctcagaatccaaagatcacatattctagtgtaacactgcaagaagtcttgagaaaaagattattgtagtgttcaaaatatttttgtattgttaatgcatcatcatagaaaaacttttaaacatgagaataaagatactttttactgggtttgtttttcaaagcctgaaaaaaa

SEQ ID NO: 123 - protein, 268 aa, Homo sapiens
MYKETVYSAFNLLMHYPPPSGAGQHPQPQPPLHKANQPPHGVPQLSLYEHFNSPHPTPAPADISQKQVHRPLQTPDLSGFYSLTSGSMGQLPHTVSWFTHPSLMLGSGVPGHPAAIPHPAIVPPSGKQELQPFDRNLKTQAESKAEKEAKKPTIKKPLNAFMLYMKEMRAKVIAECTLKESAAINQILGRRWHALSREEQAKYYELARKERQLHMQLYPGWSARDNYGKKKRRSREKHQESTTDPGSPKKCRARFGLNQQTDWCGPCR

SEQ ID NO: 124 - DNA, 2944 bp, Homo sapiens
  CDS (203)..(1012)
cctccaggtccttcccctaaaacttggcactgccgatactcccagcccgttccttcccaagtcaggaacttgcaggggaccccttggcaattctttttctctcaagagcagacagccttcagtcccagccgctgccagggctggtgtgtctgacccagctgtggtttttccaggcctgaaggccccggagtgcaccagcggcatgtacaaagagaccgtctactccgccttcaatctgctcatgcattacccacccccctcgggagcagggcagcacccccagccgcagcccccgctgcacaaggccaatcagcccccccacggtgtcccccaactctctctctacgaacatttcaacagcccacatcccacccctgcacctgcggacatcagccagaagcaagttcacaggcctctgcagacccctgacctctctggcttctactccctgacctcaggcagcatggggcagctcccccacactgtgagctggttcacccacccatccttgatgctaggttctggtgtacctggtcacccagcagccatcccccacccggccattgtgcccccctcagggaagcaggagctgcagcccttcgaccgcaacctgaagacacaagcagagtccaaggcagagaaggaggccaagaagccaaccatcaagaagcccctcaatgccttcatgctgtacatgaaggagatgagagccaaggtcattgcagagtgcacacttaaggagagcgctgccatcaaccagatcctgggccgcaggtggcacgcgctgtcgcgagaagagcaggccaagtactatgagctggcccgcaaggagaggcagctgcacatgcagctatacccaggctggtcagcgcgggacaactacgggaagaagaagaggcggtcgagggaaaagcaccaagaatccaccacaggaggaaaaagaaatgcattcggtacttacccggagaaggccgctgccccagccccgttccttccgatgacagtgctctaggctgccccgggtccccagctccccaggactcaccctcataccatctgctgccccgcttccccacagaactgcttactagccctgcggagccggcacctacatccccaggtctctccactgctctcagcctcccaaccccagggcccccacaggccccccgcagcaccctgcagagcacacaggtacagcaacaggaatctcagagacaggtggcctagcaggcacaggacacctggccgcctccaggagcctaccccctgaaagtgacagagacccagatctcatggaaactggccaggggtcctgttaacgtcatctcagggtccagaccctgaagatttcagaggctgcaggacttctgcctgaacctggggtcatcgattcaaactgctccaagtggtgggaatcagatctgtcttgatgtgtcatctaattaagggaatcccttgtacctatggctgcctgcatctattctttgtaccatctgtcttgccagccagaagcctctgcctccctagcttttctgctataggtcagagatgggctgaactgagcctagctaccttctctacccatctcccccatcccccactgccacaccctccccattcagacacttcatggaccaagaatgagctggtttgtcaaacaacatgtgagcatggtcacaagcacaaagctcaagatgacagctcttctaaggaaatggagaagctctgtttataaaaacaaaaacaaaaccagctgctactcataagttggaccagaggaagccccttactatgatctcaggagcttgcaagaagcaggaaggggaatggaataggttaagtttaggcctatcaacctaagcaacagaaataatctgacactaccttatcaggcaaattggggaggggagggtgtatctagctctagttcaaattatttggaagtgttccctgagaaacccaccagcctaagaagctctggccccaggcttgtcactagcagctgcagtcaacagttcaaagaagtcatggcccaaatccagtgtgcacccctccccattcacagagcctttttcacaattccatttccagttcatctatggcagtccagccagctcctgggcagcttgagagggcaaacccaaaacctcatgacagccagagcctgtctttcagcattcagtccgcctggccggctccagtttccccatggggctgcgggacagaggaccattacaactagatcaaggagcccagaaaacctccagtagtggacaacaggttttcaccatagcctacgttaacccatttttgagccaagcttcaaccctcagccttgaaaaacaagtctttaatttaatttttgttttttgcctaaatccaaagaaaaagggctgccgggccaggcgcggtggctcacgcctgtaatcccagcactttggcaggccgaggcaggtggatcacctgacgtcagtagtttgagaccagcctggccaacatggtgaaaccctgtatctactaaaaatacaaaaattagccggacgtggtggtgcgcgcatgtaatcccagctactcgggaggctgaggcggaagaatcacttgaacccgggaggcggaggttccagtgagccgagatggcgctattgcactccagtctgggtaacagggagactgcatctcaaaaaaaaaaaaaaaaaaaaaaaagggctgtccatgtattcacacacccctcaaaaaaagcctttagttcctactttagccactggtttctcagaatccaaagatcacatattctagtgtaacactgcaagaagtcttgagaaaaagattattgtagtgttcaaaatatttttgtattgttaatgcatcatcatagaaaaacttttaaacatgagaataaagatactttttactgggtttgtttttcaaagcctgaaaaaaa

SEQ ID NO: 125 - protein, 269 aa, Homo sapiens; identical to SEQ ID NO: 119

SEQ ID NO: 126 - DNA, 2689 bp, Homo sapiens
  CDS (264)..(1097)
acatctcccggcggcgggccgcggaagcagtgcagacgcggctcctagcggatgggtgctattgtgaggcggttgtagaagagtttcgtgagtgctcgcagctcatacctgtggctgtgtatccgtggccacagctggttggcgtcgccttgaaatcccaggccgtgaggagttagcgagccctgctcacactcggcgctctggttttcggtgggtgtgccctgcacctgcctcttcccccattctcattaataaaggtatccatggagaacactgaaaactcagtggattcaaaatccattaaaaatttggaaccaaagatcatacatggaagcgaatcaatggactctggaatatccctggacaacagttataaaatggattatcctgagatgggtttatgtataataattaataataagaattttcataaaagcactggaatgacatctcggtctggtacagatgtcgatgcagcaaacctcagggaaacattcagaaacttgaaatatgaagtcaggaataaaaatgatcttacacgtgaagaaattgtggaattgatgcgtgatgtttctaaagaagatcacagcaaaaggagcagttttgtttgtgtgcttctgagccatggtgaagaaggaataatttttggaacaaatggacctgttgacctgaaaaaaataacaaactttttcagaggggatcgttgtagaagtctaactggaaaacccaaacttttcattattcaggcctgccgtggtacagaactggactgtggcattgagacagacagtggtgttgatgatgacatggcgtgtcataaaataccagtggaggccgacttcttgtatgcatactccacagcacctggttattattcttggcgaaattcaaaggatggctcctggttcatccagtcgctttgtgccatgctgaaacagtatgccgacaagcttgaatttatgcacattcttacccgggttaaccgaaaggtggcaacagaatttgagtccttttcctttgacgctacttttcatgcaaagaaacagattccatgtattgtttccatgctcacaaaagaactctatttttatcactaaagaaatggttggttggtggttttttttagtttgtatgccaagtgagaagatggtatatttggtactgtatttccctctcattttgacctactctcatgctgcagagggtactttaagacatactccttccatcaaatagaaccactatgaagctacctcaaacttccagtcaggtagttgcaattgaattaaattaggaataaataaaaatggatactggtgcagtcattatgagaggcaatgattgttaatttacagctttcatgattagcaagttacagtgatgctgtgctatgaattttcaagtaattgtgaaaaagttaaacattgaagtaatgaatttttatgatattccccccacttaagactgtgtattctagttttgtcaaactgtagaaatgatgatgtggaagaacttaggcatctgtgggcatggtcaaaggctcaaacctttattttagaattgatatacacggatgacttaactgcatttttagaccatttatctgggattatggttttgtgatgtttgtcctgaacacttttgttgtaaaaaaataataataatgtttaatattgagaaagaaactaatattttatgtgagagaaagtgtgagcaaactaacttgacttttaaggctaaaacttaacattcatagaggggtggagttttaactgtaaggtgctacaatgcccctggatctaccagcataaatatcttctgatttgtccctatgcatatcagttgagcttcatataccagcaatatatctgaagagctattatataaaaaccccaaactgttgattattagccaggtaatgtgaataaattctataggaacatatgaaaatacaacttaaataataaacagtggaatataaggaaagcaataaatgaatgggctgagctgcctgtaacttgagagtagatggtttgagcctgagcagagacatgactcagcctgttccatgaaggcagagccatggaccacgcaggaagggcctacagcccatttctccatacgcactggtatgtgtggatgatgctgccagggcgccatcgccaagtaagaaagtgaagcaaatcagaaacttgtgaagtggaaatgttctaaaggtggtgaggcaataaaaatcatagtactctttgtagcaaaattcttaagtatgttattttctgttgaagtttacaatcaaaggaaaatagtaatgttttatactgtttactgaaagaaaaagacctatgagcacataggactctagacggcatccagccggaggccagagctgagccctcagcccgggaggcaggctccaggcctcagcaggtgcggagccgtcactgcaccaagtctcactggctgtcagtatgacatttcacgggagatttcttgttgctcaaaaaatgagctcgcatttgtcaatgacagtttcttttttcttactagacctgtaacttttgtaaatacacatagcatgtaatggtatcttaaagtgtgtttctatgtgacaattttgtacaaatttgttattttccatttttatttcaaaatatacattcaaacttaaaattaaaaaaaaaaaaaaaaa

SEQ ID NO: 127 - protein, 277 aa, Homo sapiens
MENTENSVDSKSIKNLEPKIIHGSESMDSGISLDNSYKMDYPEMGLCIIINNKNFHKSTGMTSRSGTDVDAANLRETFRNLKYEVRNKNDLTREEIVELMRDVSKEDHSKRSSFVCVLLSHGEEGIIFGTNGPVDLKKITNFFRGDRCRSLTGKPKLFIIQACRGTELDCGIETDSGVDDDMACHKIPVEADFLYAYSTAPGYYSWRNSKDGSWFIQSLCAMLKQYADKLEFMHILTRVNRKVATEFESFSFDATFHAKKQIPCIVSMLTKELYFYH

SEQ ID NO: 128 - DNA, 2522 bp, Homo sapiens
  CDS (97)..(930)
acatctcccggcggcgggccgcggaagcagtgcagacgcggctcctagcggatgggtgctattgtgaggcggttgtagaagttaataaaggtatccatggagaacactgaaaactcagtggattcaaaatccattaaaaatttggaaccaaagatcatacatggaagcgaatcaatggactctggaatatccctggacaacagttataaaatggattatcctgagatgggtttatgtataataattaataataagaattttcataaaagcactggaatgacatctcggtctggtacagatgtcgatgcagcaaacctcagggaaacattcagaaacttgaaatatgaagtcaggaataaaaatgatcttacacgtgaagaaattgtggaattgatgcgtgatgtttctaaagaagatcacagcaaaaggagcagttttgtttgtgtgcttctgagccatggtgaagaaggaataatttttggaacaaatggacctgttgacctgaaaaaaataacaaactttttcagaggggatcgttgtagaagtctaactggaaaacccaaacttttcattattcaggcctgccgtggtacagaactggactgtggcattgagacagacagtggtgttgatgatgacatggcgtgtcataaaataccagtggaggccgacttcttgtatgcatactccacagcacctggttattattcttggcgaaattcaaaggatggctcctggttcatccagtcgctttgtgccatgctgaaacagtatgccgacaagcttgaatttatgcacattcttacccgggttaaccgaaaggtggcaacagaatttgagtccttttcctttgacgctacttttcatgcaaagaaacagattccatgtattgtttccatgctcacaaaagaactctatttttatcactaaagaaatggttggttggtggttttttttagtttgtatgccaagtgagaagatggtatatttggtactgtatttccctctcattttgacctactctcatgctgcagagggtactttaagacatactccttccatcaaatagaaccactatgaagctacctcaaacttccagtcaggtagttgcaattgaattaaattaggaataaataaaaatggatactggtgcagtcattatgagaggcaatgattgttaatttacagctttcatgattagcaagttacagtgatgctgtgctatgaattttcaagtaattgtgaaaaagttaaacattgaagtaatgaatttttatgatattccccccacttaagactgtgtattctagttttgtcaaactgtagaaatgatgatgtggaagaacttaggcatctgtgggcatggtcaaaggctcaaacctttattttagaattgatatacacggatgacttaactgcatttttagaccatttatctgggattatggttttgtgatgtttgtcctgaacacttttgttgtaaaaaaataataataatgtttaatattgagaaagaaactaatattttatgtgagagaaagtgtgagcaaactaacttgacttttaaggctaaaacttaacattcatagaggggtggagttttaactgtaaggtgctacaatgcccctggatctaccagcataaatatcttctgatttgtccctatgcatatcagttgagcttcatataccagcaatatatctgaagagctattatataaaaaccccaaactgttgattattagccaggtaatgtgaataaattctataggaacatatgaaaatacaacttaaataataaacagtggaatataaggaaagcaataaatgaatgggctgagctgcctgtaacttgagagtagatggtttgagcctgagcagagacatgactcagcctgttccatgaaggcagagccatggaccacgcaggaagggcctacagcccatttctccatacgcactggtatgtgtggatgatgctgccagggcgccatcgccaagtaagaaagtgaagcaaatcagaaacttgtgaagtggaaatgttctaaaggtggtgaggcaataaaaatcatagtactctttgtagcaaaattcttaagtatgttattttctgttgaagtttacaatcaaaggaaaatagtaatgttttatactgtttactgaaagaaaaagacctatgagcacataggactctagacggcatccagccggaggccagagctgagccctcagcccgggaggcaggctccaggcctcagcaggtgcggagccgtcactgcaccaagtctcactggctgtcagtatgacatttcacgggagatttcttgttgctcaaaaaatgagctcgcatttgtcaatgacagtttcttttttcttactagacctgtaacttttgtaaatacacatagcatgtaatggtatcttaaagtgtgtttctatgtgacaattttgtacaaatttgttattttccatttttatttcaaaatatacattcaaacttaaaattaaaaaaaaaaaaaaaaa

SEQ ID NO: 129 - protein, 277 aa, Homo sapiens; identical to SEQ ID NO: 127

SEQ ID NO: 130 - DNA, 3070 bp, Homo sapiens
  CDS (558)..(1892)
ggcgccgtcttgatactttcagaaagaatgcattccctgtaaaaaaaaaaaaaaaatactgagagagggagagagagagagaagaagagagagagacggagggagagcgagacagagcgagcaacgcaatctgaccgagcaggtcgtacgccgccgcctcctcctcctctctgctcttcgctacccaggtgacccgaggagggactccgcctccgagcggctgaggaccccggtgcagaggagcctggctcgcagaattgcagagtcgtcgcccctttttacaacctggtcccgttttattctgccgtacccagtttttggatttttgtcttccccttcttctctttgctaaacgacccctccaagataatttttaaaaaaccttctcctttgctcacctttgcttcccagccttcccatccccccaccgaaagcaaatcattcaacgacccccgaccctccgacggcaggagccccccgacctcccaggcggaccgccctccctccccgcgcgcgggttccgggcccggcgagagggcgcgagcacagccgaggccatggaggtgacggcggaccagccgcgctgggtgagccaccaccaccccgccgtgctcaacgggcagcacccggacacgcaccacccgggcctcagccactcctacatggacgcggcgcagtacccgctgccggaggaggtggatgtgctttttaacatcgacggtcaaggcaaccacgtcccgccctactacggaaactcggtcagggccacggtgcagaggtaccctccgacccaccacgggagccaggtgtgccgcccgcctctgcttcatggatccctaccctggctggacggcggcaaagccctgggcagccaccacaccgcctccccctggaatctcagccccttctccaagacgtccatccaccacggctccccggggcccctctccgtctaccccccggcctcgtcctcctccttgtcggggggccacgccagcccgcacctcttcaccttcccgcccaccccgccgaaggacgtctccccggacccatcgctgtccaccccaggctcggccggctcggcccggcaggacgagaaagagtgcctcaagtaccaggtgcccctgcccgacagcatgaagctggagtcgtcccactcccgtggcagcatgaccgccctgggtggagcctcctcgtcgacccaccaccccatcaccacctacccgccctacgtgcccgagtacagctccggactcttcccccccagcagcctgctgggcggctcccccaccggcttcggatgcaagtccaggcccaaggcccggtccagcacagaaggcagggagtgtgtgaactgtggggcaacctcgaccccactgtggcggcgagatggcacgggacactacctgtgcaacgcctgcgggctctatcacaaaatgaacggacagaaccggcccctcattaagcccaagcgaaggctgtctgcagccaggagagcagggacgtcctgtgcgaactgtcagaccaccacaaccacactctggaggaggaatgccaatggggaccctgtctgcaatgcctgtgggctctactacaagcttcacaatattaacagacccctgactatgaagaaggaaggcatccagaccagaaaccgaaaaatgtctagcaaatccaaaaagtgcaaaaaagtgcatgactcactggaggacttccccaagaacagctcgtttaacccggccgccctctccagacacatgtcctccctgagccacatctcgcccttcagccactccagccacatgctgaccacgcccacgccgatgcacccgccatccagcctgtcctttggaccacaccacccctccagcatggtcaccgccatgggttagagccctgctcgatgctcacagggcccccagcgagagtccctgcagtccctttcgacttgcatttttgcaggagcagtatcatgaagcctaaacgcgatggatatatgtttttgaaggcagaaagcaaaattatgtttgccactttgcaaaggagctcactgtggtgtctgtgttccaaccactgaatctggaccccatctgtgaataagccattctgactcatatcccctatttaacagggtctctagtgctgtgaaaaaaaaaatgctgaacattgcatataacttatattgtaagaaatactgtacaatgactttattgcatctgggtagctgtaaggcatgaaggatgccaagaagtttaaggaatatgggagaaatagtgtggaaattaagaagaaactaggtctgatattcaaatggacaaactgccagttttgtttcctttcactggccacagttgtttgatgcattaaaagaaaataaaaaaaagaaaaaagagaaaagaaaaaaaaagaaaaaagttgtaggcgaatcatttgttcaaagctgttggcctctgcaaaggaaataccagttctgggcaatcagtgttaccgttcaccagttgccgttgagggtttcagagagcctttttctaggcctacatgctttgtgaacaagtccctgtaattgttgtttgtatgtataattcaaagcaccaaaataagaaaagatgtagatttatttcatcatattatacagaccgaactgttgtataaatttatttactgctagtcttaagaactgctttctttcgtttgtttgtttcaatattttccttctctctcaatttttggttgaataaactagattacattcagttggcctaaggtggttgtgctcggagggtttcttgtttcttttccattttgtttttggatgatatttattaaatagcttctaagagtccggcggcatctgtcttgtccctattcctgcagcctgtgctgagggtagcagtgtatgagctaccagcgtgcatgtcagcgaccctggcccgacaggccacgtcctgcaatcggcccggctgcctcttcgccctgtcgtgttctgtgttagtgatcactgcctttaatacagtctgttggaataatattataagcataataataaagtgaaaatattttaaaactacaa

SEQ ID NO: 131 - protein, 444 aa, Homo sapiens
MEVTADQPRWVSHHHPAVLNGQHPDTHHPGLSHSYMDAAQYPLPEEVDVLFNIDGQGNHVPPYYGNSVRATVQRYPPTHHGSQVCRPPLLHGSLPWLDGGKALGSHHTASPWNLSPFSKTSIHHGSPGPLSVYPPASSSSLSGGHASPHLFTFPPTPPKDVSPDPSLSTPGSAGSARQDEKECLKYQVPLPDSMKLESSHSRGSMTALGGASSSTHHPITTYPPYVPEYSSGLFPPSSLLGGSPTGFGCKSRPKARSSTEGRECVNCGATSTPLWRRDGTGHYLCNACGLYHKMNGQNRPLIKPKRRLSAARRAGTSCANCQTTTTTLWRRNANGDPVCNACGLYYKLHNINRPLTMKKEGIQTRNRKMSSKSKKCKKVHDSLEDFPKNSSFNPAALSRHMSSLSHISPFSHSSHMLTTPTPMHPPSSLSFGPHHPSSMVTAMG

SEQ ID NO: 132 - DNA, 3067 bp, Homo sapiens
  CDS (558)..(1889)
ggcgccgtcttgatactttcagaaagaatgcattccctgtaaaaaaaaaaaaaaaatactgagagagggagagagagagagaagaagagagagagacggagggagagcgagacagagcgagcaacgcaatctgaccgagcaggtcgtacgccgccgcctcctcctcctctctgctcttcgctacccaggtgacccgaggagggactccgcctccgagcggctgaggaccccggtgcagaggagcctggctcgcagaattgcagagtcgtcgcccctttttacaacctggtcccgttttattctgccgtacccagtttttggatttttgtcttccccttcttctctttgctaaacgacccctccaagataatttttaaaaaaccttctcctttgctcacctttgcttcccagccttcccatccccccaccgaaagcaaatcattcaacgacccccgaccctccgacggcaggagccccccgacctcccaggcggaccgccctccctccccgcgcgcgggttccgggcccggcgagagggcgcgagcacagccgaggccatggaggtgacggcggaccagccgcgctgggtgagccaccaccaccccgccgtgctcaacgggcagcacccggacacgcaccacccgggcctcagccactcctacatggacgcggcgcagtacccgctgccggaggaggtggatgtgctttttaacatcgacggtcaaggcaaccacgtcccgccctactacggaaactcggtcagggccacggtgcagaggtaccctccgacccaccacgggagccaggtgtgccgcccgcctctgcttcatggatccctaccctggctggacggcggcaaagccctgggcagccaccacaccgcctccccctggaatctcagccccttctccaagacgtccatccaccacggctccccggggcccctctccgtctaccccccggcctcgtcctcctccttgtcggggggccacgccagcccgcacctcttcaccttcccgcccaccccgccgaaggacgtctccccggacccatcgctgtccaccccaggctcggccggctcggcccggcaggacgagaaagagtgcctcaagtaccaggtgcccctgcccgacagcatgaagctggagtcgtcccactcccgtggcagcatgaccgccctgggtggagcctcctcgtcgacccaccaccccatcaccacctacccgccctacgtgcccgagtacagctccggactcttcccccccagcagcctgctgggcggctcccccaccggcttcggatgcaagtccaggcccaaggcccggtccagcacaggcagggagtgtgtgaactgtggggcaacctcgaccccactgtggcggcgagatggcacgggacactacctgtgcaacgcctgcgggctctatcacaaaatgaacggacagaaccggcccctcattaagcccaagcgaaggctgtctgcagccaggagagcagggacgtcctgtgcgaactgtcagaccaccacaaccacactctggaggaggaatgccaatggggaccctgtctgcaatgcctgtgggctctactacaagcttcacaatattaacagacccctgactatgaagaaggaaggcatccagaccagaaaccgaaaaatgtctagcaaatccaaaaagtgcaaaaaagtgcatgactcactggaggacttccccaagaacagctcgtttaacccggccgccctctccagacacatgtcctccctgagccacatctcgcccttcagccactccagccacatgctgaccacgcccacgccgatgcacccgccatccagcctgtcctttggaccacaccacccctccagcatggtcaccgccatgggttagagccctgctcgatgctcacagggcccccagcgagagtccctgcagtccctttcgacttgcatttttgcaggagcagtatcatgaagcctaaacgcgatggatatatgtttttgaaggcagaaagcaaaattatgtttgccactttgcaaaggagctcactgtggtgtctgtgttccaaccactgaatctggaccccatctgtgaataagccattctgactcatatcccctatttaacagggtctctagtgctgtgaaaaaaaaaatgctgaacattgcatataacttatattgtaagaaatactgtacaatgactttattgcatctgggtagctgtaaggcatgaaggatgccaagaagtttaaggaatatgggagaaatagtgtggaaattaagaagaaactaggtctgatattcaaatggacaaactgccagttttgtttcctttcactggccacagttgtttgatgcattaaaagaaaataaaaaaaagaaaaaagagaaaagaaaaaaaaagaaaaaagttgtaggcgaatcatttgttcaaagctgttggcctctgcaaaggaaataccagttctgggcaatcagtgttaccgttcaccagttgccgttgagggtttcagagagcctttttctaggcctacatgctttgtgaacaagtccctgtaattgttgtttgtatgtataattcaaagcaccaaaataagaaaagatgtagatttatttcatcatattatacagaccgaactgttgtataaatttatttactgctagtcttaagaactgctttctttcgtttgtttgtttcaatattttccttctctctcaatttttggttgaataaactagattacattcagttggcctaaggtggttgtgctcggagggtttcttgtttcttttccattttgtttttggatgatatttattaaatagcttctaagagtccggcggcatctgtcttgtccctattcctgcagcctgtgctgagggtagcagtgtatgagctaccagcgtgcatgtcagcgaccctggcccgacaggccacgtcctgcaatcggcccggctgcctcttcgccctgtcgtgttctgtgttagtgatcactgcctttaatacagtctgttggaataatattataagcataataataaagtgaaaatattttaaaactacaa

SEQ ID NO: 133 - protein, 443 aa, Homo sapiens
MEVTADQPRWVSHHHPAVLNGQHPDTHHPGLSHSYMDAAQYPLPEEVDVLFNIDGQGNHVPPYYGNSVRATVQRYPPTHHGSQVCRPPLLHGSLPWLDGGKALGSHHTASPWNLSPFSKTSIHHGSPGPLSVYPPASSSSLSGGHASPHLFTFPPTPPKDVSPDPSLSTPGSAGSARQDEKECLKYQVPLPDSMKLESSHSRGSMTALGGASSSTHHPITTYPPYVPEYSSGLFPPSSLLGGSPTGFGCKSRPKARSSTGRECVNCGATSTPLWRRDGTGHYLCNACGLYHKMNGQNRPLIKPKRRLSAARRAGTSCANCQTTTTTLWRRNANGDPVCNACGLYYKLHNINRPLTMKKEGIQTRNRKMSSKSKKCKKVHDSLEDFPKNSSFNPAALSRHMSSLSHISPFSHSSHMLTTPTPMHPPSSLSFGPHHPSSMVTAMG

SEQ ID NO: 134 - DNA, 1799 bp, Homo sapiens
  CDS (177)..(635)
acactggggtggtgcttagccggcgccagaccgaccctcgacttcggagaggcagcgcggttcctctgggtgcttccgcctccccttctcctgcttctccagcctcttcggcctcctcgcccgccgcgggaacccgagaccccagtgtatgccccacccctgaccccgctcgcgacatgtccaccccggctcggcggcgcctcatgcgggacttcaagaggttgcaggaggatcctccagccggagtcagcggggctccgtccgagaacaacataatggtgtggaacgcggtcattttcgggcctgaagggaccccgtttgaggatggaacatttaaacttacaatagaattcactgaagaatatccaaataaaccacctacagttagatttgtctctaagatgttccatccaaatgtctatgcagatggtagtatatgtctggacatacttcagaaccgttggagtccaacctatgatgtgtcttccattctaacatccatacagtctctgttggatgaacccaatcccaatagtccagcaaacagccaggctgctcagctgtaccaggagaacaaacgggaatatgaaaagcgtgtttctgcaatagtagaacaaagctggcgtgattgttgaccccgggtacagtttaaagaagctggccataagaaaaatatatattgatgtgtttgtcacctccctactcctgtcattacatttactttattaaaagcaaaataactgttgtgctgtttccatcttccttgccaagttttcctaccccttctaccctctccttaaacatcagaaaacaccctctatgaaatcaaatgtactgtacctgggttacttgcaaaaattactaatgcttcagtttttctgttgtatttcatttccagttttcaggcagttatttttattattgtactttaagcttttaagatgaattgttatacaagaggtgcttatgcttagcttgatgaccaggatgttatttttaacaaaatgattgctgaagtgtttcatcctggctggtccttcacttgtgttggatttagaagtgaatgtgtttggaatatggcctacagagaatagaaacaaatccatgtaaacaattttgaaggaggcatgggagctaaaaatcctgtgatactaagatctcagtcatatgaattacaacgtagtatttactggcaagaaggagaaagttgaaggactcagctaaaggagtacagcaattgtagtaactgacacatcctctctttgcaagctgctgactgggcacactcatgccaagtttcagaattattggtcttctgggtttttgctttttaaaagaggtgtgggagcagaggaatggaaacaatcgtgagtttttgagctagggaaagttggagctcctttaatctttttaaaggatcagtgctgccctaagtgaataaactcaattgtccatctttattttagagttttaatgaattcaaggaagggagcatagcatatctgtggcaaactattttccactcaaatcctgagttattgctgcatgctttaatttcttccctttcagcatctgagaaccttaaagccaatgtctgcgatctttttttggatatttatacttttagatatatagtacctttaagtagcagtatgggacaaggcttgtaaatgttttgtctaatgttctattgtcaccttttatgcatttatcacttccaaatctaactttgcacaagtaacccatgtaaaaaaaaatgtacatttttcaaaagttgtaaataaaaataaccttaaaaa

SEQ ID NO: 135 - protein, 152 aa, Homo sapiens
MSTPARRRLMRDFKRLQEDPPAGVSGAPSENNIMVWNAVIFGPEGTPFEDGTFKLTIEFTEEYPNKPPTVRFVSKMFHPNVYADGSICLDILQNRWSPTYDVSSILTSIQSLLDEPNPNSPANSQAAQLYQENKREYEKRVSAIVEQSWRDC

SEQ ID NO: 136 - DNA, 1709 bp, Homo sapiens
  CDS (177)..(545)
acactggggtggtgcttagccggcgccagaccgaccctcgacttcggagaggcagcgcggttcctctgggtgcttccgcctccccttctcctgcttctccagcctcttcggcctcctcgcccgccgcgggaacccgagaccccagtgtatgccccacccctgaccccgctcgcgacatgtccaccccggctcggcggcgcctcatgcgggacttcaagaggttgcaggaggatcctccagccggagtcagcggggctccgtccgagaacaacataatggtgtggaacgcggtcattttcgggcctgaagggaccccgtttgaggatgtctatgcagatggtagtatatgtctggacatacttcagaaccgttggagtccaacctatgatgtgtcttccattctaacatccatacagtctctgttggatgaacccaatcccaatagtccagcaaacagccaggctgctcagctgtaccaggagaacaaacgggaatatgaaaagcgtgtttctgcaatagtagaacaaagctggcgtgattgttgaccccgggtacagtttaaagaagctggccataagaaaaatatatattgatgtgtttgtcacctccctactcctgtcattacatttactttattaaaagcaaaataactgttgtgctgtttccatcttccttgccaagttttcctaccccttctaccctctccttaaacatcagaaaacaccctctatgaaatcaaatgtactgtacctgggttacttgcaaaaattactaatgcttcagtttttctgttgtatttcatttccagttttcaggcagttatttttattattgtactttaagcttttaagatgaattgttatacaagaggtgcttatgcttagcttgatgaccaggatgttatttttaacaaaatgattgctgaagtgtttcatcctggctggtccttcacttgtgttggatttagaagtgaatgtgtttggaatatggcctacagagaatagaaacaaatccatgtaaacaattttgaaggaggcatgggagctaaaaatcctgtgatactaagatctcagtcatatgaattacaacgtagtatttactggcaagaaggagaaagttgaaggactcagctaaaggagtacagcaattgtagtaactgacacatcctctctttgcaagctgctgactgggcacactcatgccaagtttcagaattattggtcttctgggtttttgctttttaaaagaggtgtgggagcagaggaatggaaacaatcgtgagtttttgagctagggaaagttggagctcctttaatctttttaaaggatcagtgctgccctaagtgaataaactcaattgtccatctttattttagagttttaatgaattcaaggaagggagcatagcatatctgtggcaaactattttccactcaaatcctgagttattgctgcatgctttaatttcttccctttcagcatctgagaaccttaaagccaatgtctgcgatctttttttggatatttatacttttagatatatagtacctttaagtagcagtatgggacaaggcttgtaaatgttttgtctaatgttctattgtcaccttttatgcatttatcacttccaaatctaactttgcacaagtaacccatgtaaaaaaaaatgtacatttttcaaaagttgtaaataaaaataaccttaaaaa

SEQ ID NO: 137 - protein, 122 aa, Homo sapiens
MSTPARRRLMRDFKRLQEDPPAGVSGAPSENNIMVWNAVIFGPEGTPFEDVYADGSICLDILQNRWSPTYDVSSILTSIQSLLDEPNPNSPANSQAAQLYQENKREYEKRVSAIVEQSWRDC

SEQ ID NO: 138 - DNA, 2678 bp, Homo sapiens
  CDS (1247)..(1480)
tagtcttctctctttcttaagcagtgataaaccttttaatgagaacaaaaaggaaataaattgctaactctgaaggaaccagtaagaaatacactgaagtatggtctgttgttttagaataatttgttaaatggaccagagtaatatagtggaacatgcatcaccttataccatatagtaactgattcttctaagtttacttgaacagatttcagtcaggaaaaaacattgctcaattgtgttcttcaatttattcaacaaacaattgaaaataatattttaaaggacataatctcttcatatcacatcttaacaattcttgaatgagatccagtttgtccatgccttgtaagtaagtttataacctactatgctttagggcctcctgctaccttaggttgacatatatttaagaaaaataatttcatttcaatagtagcataaacattagaaaaataaatttgctggaaacatgaatgcaatctaaaccaaatgtgattttaaaattatttctgccattaattccctccatatgtgtgaataattgagttgattttatagtgaagtaccttatgagccatacttaagggtttctgagagggactatgaagtttttcctggcttaaattcaattaagttttcattatagggtcactatgacatgaaaaggaaccagtatgaacacttttatacttattcccttctattttaaaaataacttgattatggatttgtattctggcattggtttttgaaccattgtgctttcattctttctagtctgtctaaaaatcactggagcgtttaagatggcagctgactaacataggcctttgaggtcttttggtcttctaaaggaagaaggccaaattttgggcccagtttcttaaggatgttttcaaaatgtacagtggctaaaatcttgtaagcagtaattttgtgtttatgatggctgtctccaagtttgggggaaaataatggcaaaacaaaaaatcacatttgagtagttcttagagcaattcctagagatgtatttcttacctggcctttcctctctaccctgtatctttgcattatttaatacttggaaaaacccacatagcattaaaaacaaagtactactgaacaaagtgataaatacattttcttaaatctttcttttctaaccacaggaacatttaaacttacaatagaattcactgaagaatatccaaataaaccacctacagttagatttgtctctaagatgttccatccaaatgtctatgcagatggtagtatatgtctggacatacttcagaaccgttggagtccaacctatgatgtgtcttccattctaacatccatacagtctctgttggatgaacccaatcccaatagtccagcaaacagccaggctgctcagctgtaccaggagaacaaacgggaatatgaaaagcgtgtttctgcaatagtagaacaaagctggcgtgattgttgaccccgggtacagtttaaagaagctggccataagaaaaatatatattgatgtgtttgtcacctccctactcctgtcattacatttactttattaaaagcaaaataactgttgtgctgtttccatcttccttgccaagttttcctaccccttctaccctctccttaaacatcagaaaacaccctctatgaaatcaaatgtactgtacctgggttacttgcaaaaattactaatgcttcagtttttctgttgtatttcatttccagttttcaggcagttatttttattattgtactttaagcttttaagatgaattgttatacaagaggtgcttatgcttagcttgatgaccaggatgttatttttaacaaaatgattgctgaagtgtttcatcctggctggtccttcacttgtgttggatttagaagtgaatgtgtttggaatatggcctacagagaatagaaacaaatccatgtaaacaattttgaaggaggcatgggagctaaaaatcctgtgatactaagatctcagtcatatgaattacaacgtagtatttactggcaagaaggagaaagttgaaggactcagctaaaggagtacagcaattgtagtaactgacacatcctctctttgcaagctgctgactgggcacactcatgccaagtttcagaattattggtcttctgggtttttgctttttaaaagaggtgtgggagcagaggaatggaaacaatcgtgagtttttgagctagggaaagttggagctcctttaatctttttaaaggatcagtgctgccctaagtgaataaactcaattgtccatctttattttagagttttaatgaattcaaggaagggagcatagcatatctgtggcaaactattttccactcaaatcctgagttattgctgcatgctttaatttcttccctttcagcatctgagaaccttaaagccaatgtctgcgatctttttttggatatttatacttttagatatatagtacctttaagtagcagtatgggacaaggcttgtaaatgttttgtctaatgttctattgtcaccttttatgcatttatcacttccaaatctaactttgcacaagtaacccatgtaaaaaaaaatgtacatttttcaaaagttgtaaataaaaataaccttaaaaaaaaaaaaaaaaaaaaaaaaaaaaaaaaaaaaaaa

SEQ ID NO: 139 - protein, 77 aa, Homo sapiens
MFHPNVYADGSICLDILQNRWSPTYDVSSILTSIQSLLDEPNPNSPANSQAAQLYQENKREYEKRVSAIVEQSWRDC

SEQ ID NO: 140 - DNA, 3682 bp, Homo sapiens
  CDS (90)..(1475)
gcgagcgcagcggagcctggagagaaggcgctgggctgcgagggcgcgagggcgcgagggcagggggcaaccggaccccgcccgcacccatggcgcccgtcgccgtctgggccgcgctggccgtcggactggagctctgggctgcggcgcacgccttgcccgcccaggtggcatttacaccctacgccccggagcccgggagcacatgccggctcagagaatactatgaccagacagctcagatgtgctgcagcaaatgctcgccgggccaacatgcaaaagtcttctgtaccaagacctcggacaccgtgtgtgactcctgtgaggacagcacatacacccagctctggaactgggttcccgagtgcttgagctgtggctcccgctgtagctctgaccaggtggaaactcaagcctgcactcgggaacagaaccgcatctgcacctgcaggcccggctggtactgcgcgctgagcaagcaggaggggtgccggctgtgcgcgccgctgcgcaagtgccgcccgggcttcggcgtggccagaccaggaactgaaacatcagacgtggtgtgcaagccctgtgccccggggacgttctccaacacgacttcatccacggatatttgcaggccccaccagatctgtaacgtggtggccatccctgggaatgcaagcatggatgcagtctgcacgtccacgtcccccacccggagtatggccccaggggcagtacacttaccccagccagtgtccacacgatcccaacacacgcagccaactccagaacccagcactgctccaagcacctccttcctgctcccaatgggccccagccccccagctgaagggagcactggcgacttcgctcttccagttggactgattgtgggtgtgacagccttgggtctactaataataggagtggtgaactgtgtcatcatgacccaggtgaaaaagaagcccttgtgcctgcagagagaagccaaggtgcctcacttgcctgccgataaggcccggggtacacagggccccgagcagcagcacctgctgatcacagcgccgagctccagcagcagctccctggagagctcggccagtgcgttggacagaagggcgcccactcggaaccagccacaggcaccaggcgtggaggccagtggggccggggaggcccgggccagcaccgggagctcagattcttcccctggtggccatgggacccaggtcaatgtcacctgcatcgtgaacgtctgtagcagctctgaccacagctcacagtgctcctcccaagccagctccacaatgggagacacagattccagcccctcggagtccccgaaggacgagcaggtccccttctccaaggaggaatgtgcctttcggtcacagctggagacgccagagaccctgctggggagcaccgaagagaagcccctgccccttggagtgcctgatgctgggatgaagcccagttaaccaggccggtgtgggctgtgtcgtagccaaggtgggctgagccctggcaggatgaccctgcgaaggggccctggtccttccaggcccccaccactaggactctgaggctctttctgggccaagttcctctagtgccctccacagccgcagcctccctctgacctgcaggccaagagcagaggcagcgagttgtggaaagcctctgctgccatggcgtgtccctctcggaaggctggctgggcatggacgttcggggcatgctggggcaagtccctgactctctgtgacctgccccgcccagctgcacctgccagcctggcttctggagcccttgggttttttgtttgtttgtttgtttgtttgtttgtttctccccctgggctctgccccagctctggcttccagaaaaccccagcatccttttctgcagaggggctttctggagaggagggatgctgcctgagtcacccatgaagacaggacagtgcttcagcctgaggctgagactgcgggatggtcctggggctctgtgcagggaggaggtggcagccctgtagggaacggggtccttcaagttagctcaggaggcttggaaagcatcacctcaggccaggtgcagtggctcacgcctatgatcccagcactttgggaggctgaggcgggtggatcacctgaggttaggagttcgagaccagcctggccaacatggtaaaaccccatctctactaaaaatacagaaattagccgggcgtggtggcgggcacctatagtcccagctactcagaagcctgaggctgggaaatcgtttgaacccgggaagcggaggttgcagggagccgagatcacgccactgcactccagcctgggcgacagagcgagagtctgtctcaaaagaaaaaaaaaagcaccgcctccaaatgccaacttgtccttttgtaccatggtgtgaaagtcagatgcccagagggcccaggcaggccaccatattcagtgctgtggcctgggcaagataacgcacttctaactagaaatctgccaattttttaaaaaagtaagtaccactcaggccaacaagccaacgacaaagccaaactctgccagccacatccaaccccccacctgccatttgcaccctccgccttcactccggtgtgcctgcagccccgcgcctccttccttgctgtcctaggccacaccatctcctttcagggaatttcaggaactagagatgactgagtcctcgtagccatctctctactcctacctcagcctagaccctcctcctcccccagaggggtgggttcctcttccccactccccaccttcaattcctgggccccaaacgggctgccctgccactttggtacatggccagtgtgatcccaagtgccagtcttgtgtctgcgtctgtgttgcgtgtcgtgggtgtgtgtagccaaggtcggtaagttgaatggcctgccttgaagccactgaagctgggattcctccccattagagtcagccttccccctcccagggccagggccctgcagaggggaaaccagtgtagccttgcccggattctgggaggaagcaggttgaggggctcctggaaaggctcagtctcaggagcatggggataaaggagaaggcatgaaattgtctagcagagcaggggcagggtgataaattgttgataaattccactggacttgagcttggcagctgaactattggagggtgggagagcccagccattaccatggagacaagaagggttttccaccctggaatcaagatgtcagactggctggctgcagtgacgtgcacctgtactcaggaggctgaggggaggatcactggagcccaggagtttgaggctgcagcgagctatgatcgcgccactacactccagcctgagcaacagagtgagaccctgtctcttaaagaaaaaaaaagtcagactgctgggactggccaggtttctgcccacattggacccacatgaggacatgatggagcgcacctgccccctggtggacagtcctgggagaacctcaggcttccttggcatcacagggcagagccgggaagcgatgaatttggagactctgtggggccttggttcccttgtgtgtgtgtgttgatcccaagacaatgaaagtttgcactgtatgctggacggcattcctgcttatcaataaacctgtttgttttaaaaaaaa

SEQ ID NO: 141 - protein, 461 aa, Homo sapiens
MAPVAVWAALAVGLELWAAAHALPAQVAFTPYAPEPGSTCRLREYYDQTAQMCCSKCSPGQHAKVFCTKTSDTVCDSCEDSTYTQLWNWVPECLSCGSRCSSDQVETQACTREQNRICTCRPGWYCALSKQEGCRLCAPLRKCRPGFGVARPGTETSDVVCKPCAPGTFSNTTSSTDICRPHQICNVVAIPGNASMDAVCTSTSPTRSMAPGAVHLPQPVSTRSQHTQPTPEPSTAPSTSFLLPMGPSPPAEGSTGDFALPVGLIVGVTALGLLIIGVVNCVIMTQVKKKPLCLQREAKVPHLPADKARGTQGPEQQHLLITAPSSSSSSLESSASALDRRAPTRNQPQAPGVEASGAGEARASTGSSDSSPGGHGTQVNVTCIVNVCSSSDHSSQCSSQASSTMGDTDSSPSESPKDEQVPFSKEECAFRSQLETPETLLGSTEEKPLPLGVPDAGMKPS

SEQ ID NO: 142 - DNA, 2894 bp, Homo sapiens
  CDS (289)..(1779)
ggtttctgtttcaccttgtgtctgagctggtctgaaggctggttgttcagactgagcttcctgcctgcctgtaccccgccaacagcttcagaagaaggtgactggtggctgcctgaggaataccagtgggcaagagaattagcatttctggagcatctgctgtctgagcagcccctgggtgcgtccactttctgggcacgtgaggttgggccttggccgcctgagcccttgagttggtcacttgaaccttgggaatattgagattatattctcctgccttttaaaaagatggacttcagcagaaatctttatgatattggggaacaactggacagtgaagatctggcctccctcaagttcctgagcctggactacattccgcaaaggaagcaagaacccatcaaggatgccttgatgttattccagagactccaggaaaagagaatgttggaggaaagcaatctgtccttcctgaaggagctgctcttccgaattaatagactggatttgctgattacctacctaaacactagaaaggaggagatggaaagggaacttcagacaccaggcagggctcaaatttctgcctacaggttccacttctgccgcatgagctgggctgaagcaaacagccagtgccagacacagtctgtacctttctggcggagggtcgatcatctattaataagggtcatgctctatcagatttcagaagaagtgagcagatcagaattgaggtcttttaagtttcttttgcaagaggaaatctccaaatgcaaactggatgatgacatgaacctgctggatattttcatagagatggagaagagggtcatcctgggagaaggaaagttggacatcctgaaaagagtctgtgcccaaatcaacaagagcctgctgaagataatcaacgactatgaagaattcagcaaaggggaggagttgtgtggggtaatgacaatctcggactctccaagagaacaggatagtgaatcacagactttggacaaagtttaccaaatgaaaagcaaacctcggggatactgtctgatcatcaacaatcacaattttgcaaaagcacgggagaaagtgcccaaacttcacagcattagggacaggaatggaacacacttggatgcaggggctttgaccacgacctttgaagagcttcattttgagatcaagccccacgatgactgcacagtagagcaaatctatgagattttgaaaatctaccaactcatggaccacagtaacatggactgcttcatctgctgtatcctctcccatggagacaagggcatcatctatggcactgatggacaggaggcccccatctatgagctgacatctcagttcactggtttgaagtgcccttcccttgctggaaaacccaaagtgttttttattcaggcttgtcagggggataactaccagaaaggtatacctgttgagactgattcagaggagcaaccctatttagaaatggatttatcatcacctcaaacgagatatatcccggatgaggctgactttctgctggggatggccactgtgaataactgtgtttcctaccgaaaccctgcagagggaacctggtacatccagtcactttgccagagcctgagagagcgatgtcctcgaggcgatgatattctcaccatcctgactgaagtgaactatgaagtaagcaacaaggatgacaagaaaaacatggggaaacagatgcctcagcctactttcacactaagaaaaaaacttgtcttcccttctgattgatggtgctattttgtttgttttgttttgttttgtttttttgagacagaatctcgctctgtcgcccaggctggagtgcagtggcgtgatctcggctcaccgcaagctccgcctcccgggttcaggccattctcctgcctcagcctcccgagtagctgggactacaggggcccgccaccacacctggctaattttttaaaaatatttttagtagagacagggtttcactgtgttagccagggtggtcttgatctcctgacctcgtgatccacccacctcggcctcccaaagtgctgggattacaggcgtgagccaccgcgcctggccgatggtactatttagatataacactatgtttatttactaattttctagattttctactttattaattgttttgcacttttttataagagctaaagttaaataggatattaacaacaataacactgtctcctttctcttatgcttaaggctttgggaatgtttttagctggtggcaataaataccagacacgtacaaaatccagctatgaatatagagggcttatgattcagattgttatctatcaactataagcccactgttaatattctattaactttaattctctttcaaagctaaattccacactaccacattaaaaaaattagaaagtagccacgtatggtggctcatgtctataatcccagcactttgggaggttgaggtgggaggattgcttgaacccaagaggtcaaggctgcagtgagccatgttcacaccgctgcactcaagcttgggtgacagaacaagaccccgtctcaaaaaaaattttttttttaataaaacaaaatttgtttgaaatcttttaaaaattcaaatgatttttacaagttttaaataagctctccccaaacttgctttatgccttcttattgcttttatgatatatatatgcttggctaactatatttgctttttgctaacaatgctctggggtctttttatgcatttgcatttgctctttcatctctgcttggattattttaaatcattaggaattaagttatctttaaaatttaagtatcttttttcaaaaacattttttaatagaataaaatataatttgatctta

SEQ ID NO: 143 - protein, 496 aa, Homo sapiens
MDFSRNLYDIGEQLDSEDLASLKFLSLDYIPQRKQEPIKDALMLFQRLQEKRMLEESNLSFLKELLFRINRLDLLITYLNTRKEEMERELQTPGRAQISAYRFHFCRMSWAEANSQCQTQSVPFWRRVDHLLIRVMLYQISEEVSRSELRSFKFLLQEEISKCKLDDDMNLLDIFIEMEKRVILGEGKLDILKRVCAQINKSLLKIINDYEEFSKGEELCGVMTISDSPREQDSESQTLDKVYQMKSKPRGYCLIINNHNFAKAREKVPKLHSIRDRNGTHLDAGALTTTFEELHFEIKPHDDCTVEQIYEILKIYQLMDHSNMDCFICCILSHGDKGIIYGTDGQEAPIYELTSQFTGLKCPSLAGKPKVFFIQACQGDNYQKGIPVETDSEEQPYLEMDLSSPQTRYIPDEADFLLGMATVNNCVSYRNPAEGTWYIQSLCQSLRERCPRGDDILTILTEVNYEVSNKDDKKNMGKQMPQPTFTLRKKLVFPSD

SEQ ID NO: 144 - DNA, 2908 bp, Homo sapiens
  CDS (354)..(1793)
aggagtaaagtttaccctgcagttccttctgtggtgaagttttctctttctctcggagaccagattctgcctttctgctggagggaagtgttttcacaggttctcctccttttatcttttgtgttttttttcaagccctgctgaatttgctagtcaactcaacaggaagtgaggccatggagggaggcagaagagccagggtggttattgaaagtaaaagaaacttcttcctgggagcctttcccacccccttccctgctgagcacgtggagttaggcaggttaggggactcggagactgcgatggtgccaggaaagggtggagcggattatattctcctgccttttaaaaagatggacttcagcagaaatctttatgatattggggaacaactggacagtgaagatctggcctccctcaagttcctgagcctggactacattccgcaaaggaagcaagaacccatcaaggatgccttgatgttattccagagactccaggaaaagagaatgttggaggaaagcaatctgtccttcctgaaggagctgctcttccgaattaatagactggatttgctgattacctacctaaacactagaaaggaggagatggaaagggaacttcagacaccaggcagggctcaaatttctgcctacagggtcatgctctatcagatttcagaagaagtgagcagatcagaattgaggtcttttaagtttcttttgcaagaggaaatctccaaatgcaaactggatgatgacatgaacctgctggatattttcatagagatggagaagagggtcatcctgggagaaggaaagttggacatcctgaaaagagtctgtgcccaaatcaacaagagcctgctgaagataatcaacgactatgaagaattcagcaaagagagaagcagcagccttgaaggaagtcctgatgaattttcaaatggggaggagttgtgtggggtaatgacaatctcggactctccaagagaacaggatagtgaatcacagactttggacaaagtttaccaaatgaaaagcaaacctcggggatactgtctgatcatcaacaatcacaattttgcaaaagcacgggagaaagtgcccaaacttcacagcattagggacaggaatggaacacacttggatgcaggggctttgaccacgacctttgaagagcttcattttgagatcaagccccacgatgactgcacagtagagcaaatctatgagattttgaaaatctaccaactcatggaccacagtaacatggactgcttcatctgctgtatcctctcccatggagacaagggcatcatctatggcactgatggacaggaggcccccatctatgagctgacatctcagttcactggtttgaagtgcccttcccttgctggaaaacccaaagtgttttttattcaggcttgtcagggggataactaccagaaaggtatacctgttgagactgattcagaggagcaaccctatttagaaatggatttatcatcacctcaaacgagatatatcccggatgaggctgactttctgctggggatggccactgtgaataactgtgtttcctaccgaaaccctgcagagggaacctggtacatccagtcactttgccagagcctgagagagcgatgtcctcgaggcgatgatattctcaccatcctgactgaagtgaactatgaagtaagcaacaaggatgacaagaaaaacatggggaaacagatgcctcagcctactttcacactaagaaaaaaacttgtcttcccttctgattgatggtgctattttgtttgttttgttttgttttgtttttttgagacagaatctcgctctgtcgcccaggctggagtgcagtggcgtgatctcggctcaccgcaagctccgcctcccgggttcaggccattctcctgcctcagcctcccgagtagctgggactacaggggcccgccaccacacctggctaattttttaaaaatatttttagtagagacagggtttcactgtgttagccagggtggtcttgatctcctgacctcgtgatccacccacctcggcctcccaaagtgctgggattacaggcgtgagccaccgcgcctggccgatggtactatttagatataacactatgtttatttactaattttctagattttctactttattaattgttttgcacttttttataagagctaaagttaaataggatattaacaacaataacactgtctcctttctcttatgcttaaggctttgggaatgtttttagctggtggcaataaataccagacacgtacaaaatccagctatgaatatagagggcttatgattcagattgttatctatcaactataagcccactgttaatattctattaactttaattctctttcaaagctaaattccacactaccacattaaaaaaattagaaagtagccacgtatggtggctcatgtctataatcccagcactttgggaggttgaggtgggaggattgcttgaacccaagaggtcaaggctgcagtgagccatgttcacaccgctgcactcaagcttgggtgacagaacaagaccccgtctcaaaaaaaattttttttttaataaaacaaaatttgtttgaaatcttttaaaaattcaaatgatttttacaagttttaaataagctctccccaaacttgctttatgccttcttattgcttttatgatatatatatgcttggctaactatatttgctttttgctaacaatgctctggggtctttttatgcatttgcatttgctctttcatctctgcttggattattttaaatcattaggaattaagttatctttaaaatttaagtatcttttttcaaaaacattttttaatagaataaaatataatttgatctta

SEQ ID NO: 145 - protein, 479 aa, Homo sapiens
MDFSRNLYDIGEQLDSEDLASLKFLSLDYIPQRKQEPIKDALMLFQRLQEKRMLEESNLSFLKELLFRINRLDLLITYLNTRKEEMERELQTPGRAQISAYRVMLYQISEEVSRSELRSFKFLLQEEISKCKLDDDMNLLDIFIEMEKRVILGEGKLDILKRVCAQINKSLLKIINDYEEFSKERSSSLEGSPDEFSNGEELCGVMTISDSPREQDSESQTLDKVYQMKSKPRGYCLIINNHNFAKAREKVPKLHSIRDRNGTHLDAGALTTTFEELHFEIKPHDDCTVEQIYEILKIYQLMDHSNMDCFICCILSHGDKGIIYGTDGQEAPIYELTSQFTGLKCPSLAGKPKVFFIQACQGDNYQKGIPVETDSEEQPYLEMDLSSPQTRYIPDEADFLLGMATVNNCVSYRNPAEGTWYIQSLCQSLRERCPRGDDILTILTEVNYEVSNKDDKKNMGKQMPQPTFTLRKKLVFPSD

SEQ ID NO: 146 - DNA, 2631 bp, Homo sapiens
  CDS (122)..(1516)
cccttccgtccttcattagacgtttgctcttgtcttagatgctcagatggtagtggataggcctgtgacgaaggtgctaccatcgtgagagtaagattatattctcctgccttttaaaaagatggacttcagcagaaatctttatgatattggggaacaactggacagtgaagatctggcctccctcaagttcctgagcctggactacattccgcaaaggaagcaagaacccatcaaggatgccttgatgttattccagagactccaggaaaagagaatgttggaggaaagcaatctgtccttcctgaaggagctgctcttccgaattaatagactggatttgctgattacctacctaaacactagaaaggaggagatggaaagggaacttcagacaccaggcagggctcaaatttctgcctacagggtcatgctctatcagatttcagaagaagtgagcagatcagaattgaggtcttttaagtttcttttgcaagaggaaatctccaaatgcaaactggatgatgacatgaacctgctggatattttcatagagatggagaagagggtcatcctgggagaaggaaagttggacatcctgaaaagagtctgtgcccaaatcaacaagagcctgctgaagataatcaacgactatgaagaattcagcaaaggggaggagttgtgtggggtaatgacaatctcggactctccaagagaacaggatagtgaatcacagactttggacaaagtttaccaaatgaaaagcaaacctcggggatactgtctgatcatcaacaatcacaattttgcaaaagcacgggagaaagtgcccaaacttcacagcattagggacaggaatggaacacacttggatgcaggggctttgaccacgacctttgaagagcttcattttgagatcaagccccacgatgactgcacagtagagcaaatctatgagattttgaaaatctaccaactcatggaccacagtaacatggactgcttcatctgctgtatcctctcccatggagacaagggcatcatctatggcactgatggacaggaggcccccatctatgagctgacatctcagttcactggtttgaagtgcccttcccttgctggaaaacccaaagtgttttttattcaggcttgtcagggggataactaccagaaaggtatacctgttgagactgattcagaggagcaaccctatttagaaatggatttatcatcacctcaaacgagatatatcccggatgaggctgactttctgctggggatggccactgtgaataactgtgtttcctaccgaaaccctgcagagggaacctggtacatccagtcactttgccagagcctgagagagcgatgtcctcgaggcgatgatattctcaccatcctgactgaagtgaactatgaagtaagcaacaaggatgacaagaaaaacatggggaaacagatgcctcagcctactttcacactaagaaaaaaacttgtcttcccttctgattgatggtgctattttgtttgttttgttttgttttgtttttttgagacagaatctcgctctgtcgcccaggctggagtgcagtggcgtgatctcggctcaccgcaagctccgcctcccgggttcaggccattctcctgcctcagcctcccgagtagctgggactacaggggcccgccaccacacctggctaattttttaaaaatatttttagtagagacagggtttcactgtgttagccagggtggtcttgatctcctgacctcgtgatccacccacctcggcctcccaaagtgctgggattacaggcgtgagccaccgcgcctggccgatggtactatttagatataacactatgtttatttactaattttctagattttctactttattaattgttttgcacttttttataagagctaaagttaaataggatattaacaacaataacactgtctcctttctcttatgcttaaggctttgggaatgtttttagctggtggcaataaataccagacacgtacaaaatccagctatgaatatagagggcttatgattcagattgttatctatcaactataagcccactgttaatattctattaactttaattctctttcaaagctaaattccacactaccacattaaaaaaattagaaagtagccacgtatggtggctcatgtctataatcccagcactttgggaggttgaggtgggaggattgcttgaacccaagaggtcaaggctgcagtgagccatgttcacaccgctgcactcaagcttgggtgacagaacaagaccccgtctcaaaaaaaattttttttttaataaaacaaaatttgtttgaaatcttttaaaaattcaaatgatttttacaagttttaaataagctctccccaaacttgctttatgccttcttattgcttttatgatatatatatgcttggctaactatatttgctttttgctaacaatgctctggggtctttttatgcatttgcatttgctctttcatctctgcttggattattttaaatcattaggaattaagttatctttaaaatttaagtatcttttttcaaaaacattttttaatagaataaaatataatttgatctta

SEQ ID NO: 147 - protein, 464 aa, Homo sapiens
MDFSRNLYDIGEQLDSEDLASLKFLSLDYIPQRKQEPIKDALMLFQRLQEKRMLEESNLSFLKELLFRINRLDLLITYLNTRKEEMERELQTPGRAQISAYRVMLYQISEEVSRSELRSFKFLLQEEISKCKLDDDMNLLDIFIEMEKRVILGEGKLDILKRVCAQINKSLLKIINDYEEFSKGEELCGVMTISDSPREQDSESQTLDKVYQMKSKPRGYCLIINNHNFAKAREKVPKLHSIRDRNGTHLDAGALTTTFEELHFEIKPHDDCTVEQIYEILKIYQLMDHSNMDCFICCILSHGDKGIIYGTDGQEAPIYELTSQFTGLKCPSLAGKPKVFFIQACQGDNYQKGIPVETDSEEQPYLEMDLSSPQTRYIPDEADFLLGMATVNNCVSYRNPAEGTWYIQSLCQSLRERCPRGDDILTILTEVNYEVSNKDDKKNMGKQMPQPTFTLRKKLVFPSD

SEQ ID NO: 148 - DNA, 1101 bp, Homo sapiens
  CDS (282)..(989)
gtttcaccttgtgtctgagctggtctgaaggctggttgttcagactgagcttcctgcctgcctgtaccccgccaacagcttcagaagaaggtgactggtggctgcctgaggaataccagtgggcaagagaattagcatttctggagcatctgctgtctgagcagcccctgggtgcgtccactttctgggcacgtgaggttgggccttggccgcctgagcccttgagttggtcacttgaaccttgggaatattgagattatattctcctgccttttaaaaagatggacttcagcagaaatctttatgatattggggaacaactggacagtgaagatctggcctccctcaagttcctgagcctggactacattccgcaaaggaagcaagaacccatcaaggatgccttgatgttattccagagactccaggaaaagagaatgttggaggaaagcaatctgtccttcctgaaggagctgctcttccgaattaatagactggatttgctgattacctacctaaacactagaaaggaggagatggaaagggaacttcagacaccaggcagggctcaaatttctgcctacagggtcatgctctatcagatttcagaagaagtgagcagatcagaattgaggtcttttaagtttcttttgcaagaggaaatctccaaatgcaaactggatgatgacatgaacctgctggatattttcatagagatggagaagagggtcatcctgggagaaggaaagttggacatcctgaaaagagtctgtgcccaaatcaacaagagcctgctgaagataatcaacgactatgaagaattcagcaaagagagaagcagcagccttgaaggaagtcctgatgaattttcaaatgactttggacaaagtttaccaaatgaaaagcaaacctcggggatactgtctgatcatcaacaatcacaattttgcaaaagcacgggagaaagtgcccaaacttcacagcattagggacaggaatggaacacacttggatgcagggtttgagaatgtttttagctggtggcaataaatattagaagcctgcagaatccagctacgaatatagagggttttgctcttg

SEQ ID NO: 149 - protein, 235 aa, Homo sapiens
MDFSRNLYDIGEQLDSEDLASLKFLSLDYIPQRKQEPIKDALMLFQRLQEKRMLEESNLSFLKELLFRINRLDLLITYLNTRKEEMERELQTPGRAQISAYRVMLYQISEEVSRSELRSFKFLLQEEISKCKLDDDMNLLDIFIEMEKRVILGEGKLDILKRVCAQINKSLLKIINDYEEFSKERSSSLEGSPDEFSNDFGQSLPNEKQTSGILSDHQQSQFCKSTGESAQTSQH

SEQ ID NO: 150 - DNA, 3137 bp, Homo sapiens
  CDS (789)..(2375)
gcaacagcctcccgccgagccggccgggacagaggcggcccccacccccactgggcaggggactgcagacggcgctccccgactctcaagacgaccagggagcttcccttttcctcagcggggtgaggggcatctgtcgcccgccgacttggaggtggaggggcagggacattccctcgccatcacctcaggagctagaacgcgcccttctcgcagcagggcgtgggcctcccaatccctccaaggggcggacggcgtgcgcaaccccctggagaagcaacaggcgcccccatccccctccaagccgggtaacgccgaccccctcgtccctcccgctcttcacctccggaagccgggccaaagcctgggcgaacgactgcgcctcactccgccccctgcgccattttatcgccccctccccgacctcccctaccccgagtcagccgggccaacaccagggggagggcaaaccagcagtgattggcaggaaaccgtcccgcctctaggagggttgtgccccgctcaggcgcctcagccccgccctccgcaccgcccaccgtgcccactggctccaccttttcccgtctcatcgacctgctcgactctctgctgctcctcactttttccggccgctgccggaggggtccaggccgagtaagcggagcgccgagcccagctgatgcaacctggctggactcgcgtgacagttcccggcacgcggcggcgacggtgacccaggaaggggctctggtgccgggctgagcgggggaagcaggggtagcggagccatgggggacgctcccagccctgaagagaaactgcaccttatcacccggaacctgcaggaggttctgggggaagagaagctgaaggagatactgaaggagcgggaacttaaaatttactggggaacggcaaccacgggcaaaccacatgtggcttactttgtgcccatgtcaaagattgcagacttcttaaaggcagggtgtgaggtaacaattctgtttgcggacctccacgcatacctggataacatgaaagccccatgggaacttctagaactccgagtcagttactatgagaatgtgatcaaagcaatgctggagagcattggtgtgcccttggagaagctcaagttcatcaaaggcactgattaccagctcagcaaagagtacacactagatgtgtacagactctcctccgtggtcacacagcacgattccaagaaggctggagctgaggtggtaaagcaggtggagcaccctttgctgagtggcctcttataccccggactgcaggctttggatgaagagtatttaaaagtagatgcccaatttggaggcattgatcagagaaagattttcacctttgcagagaagtacctccctgcacttggctattcaaaacgggtccatctgatgaatcctatggttccaggattaacaggcagcaaaatgagctcttcagaagaggagtccaagattgatctccttgatcggaaggaggatgtgaagaaaaaactgaagaaggccttctgtgagccaggaaatgtggagaacaatggggttctgtccttcatcaagcatgtcctttttccccttaagtccgagtttgtgatcctacgagatgagaaatggggtggaaacaaaacctacacagcttacgtggacctggaaaaggactttgctgctgaggttgtacatcctggagacctgaagaattctgttgaagtcgcactgaacaagttgctggatccaatccgggaaaagtttaatacccctgccctgaaaaaactggccagcgctgcctacccagatccctcaaagcagaagccaatggccaaaggccctgccaagaattcagaaccagaggaggtcatcccatcccggctggatatccgtgtggggaaaatcatcactgtggagaagcacccagatgcagacagcctgtatgtagagaagattgacgtgggggaagctgaaccacggactgtggtgagcggcctggtacagttcgtgcccaaggaggaactgcaggacaggctggtagtggtgctgtgcaacctgaaaccccagaagatgagaggagtcgagtcccaaggcatgcttctgtgtgcttctatagaagggataaaccgccaggttgaacctctggaccctccggcaggctctgctcctggtgagcacgtgtttgtgaagggctatgaaaagggccaaccagatgaggagctcaagcccaagaagaaagtcttcgagaagttgcaggctgacttcaaaatttctgaggagtgcatcgcacagtggaagcaaaccaacttcatgaccaagctgggctccatttcctgtaaatcgctgaaaggggggaacattagctagccagcccagcatcttccccccttcttccaccactgagtcatctgctgtctcttcagtctgctccatccatcacccatttacccatctctcaggacacggaagcagcgggtttggactctttattcggtgcagaactcggcaaggggcagcttaccctccccagaacccaggatcatcctgtctggctgcagtgagagaccaacccctaacaagggctgggccacagcagggagtccagccctaccttcttcccttggcagctggagaaatctggtttcaatataactcatttaaaaatttatgccacagtccttataattggaaaaatactggtgcccaggttttcttggagttatccaagcagctgcgcccctagctgggatctggtacctggactaggctaattacagcttctccccaacaggaaactgtgggatttgaaaaggaaagggaagggaaaacagagaacctagtggtctaccaagtggttggcaactttcccaatgtctgcttactctgaggcttggcactgggggccagggcctgccccagggctcctggaatttcccttgatccagctaggctgggacactccctaaatcagctgcgtgttgttagcatcaggcagaatgaatggcagagagtgattctgtcttcatagagggtggggtacttctccataaggcatctcagtcaaatccccatcactgtcataaattcaaataaaatgtctgaacaagggaaaaaaaaaaaaaaaaaaaa

SEQ ID NO: 151 - protein, 528 aa, Homo sapiens
MGDAPSPEEKLHLITRNLQEVLGEEKLKEILKERELKIYWGTATTGKPHVAYFVPMSKIADFLKAGCEVTILFADLHAYLDNMKAPWELLELRVSYYENVIKAMLESIGVPLEKLKFIKGTDYQLSKEYTLDVYRLSSVVTQHDSKKAGAEVVKQVEHPLLSGLLYPGLQALDEEYLKVDAQFGGIDQRKIFTFAEKYLPALGYSKRVHLMNPMVPGLTGSKMSSSEEESKIDLLDRKEDVKKKLKKAFCEPGNVENNGVLSFIKHVLFPLKSEFVILRDEKWGGNKTYTAYVDLEKDFAAEVVHPGDLKNSVEVALNKLLDPIREKFNTPALKKLASAAYPDPSKQKPMAKGPAKNSEPEEVIPSRLDIRVGKIITVEKHPDADSLYVEKIDVGEAEPRTVVSGLVQFVPKEELQDRLVVVLCNLKPQKMRGVESQGMLLCASIEGINRQVEPLDPPAGSAPGEHVFVKGYEKGQPDEELKPKKKVFEKLQADFKISEECIAQWKQTNFMTKLGSISCKSLKGGNIS

SEQ ID NO: 152 - DNA, 7493 bp, Homo sapiens
  CDS (71)..(5830)
gcctgcccgcccgccggcctcggggggcccgggaggcgtccggcggggcggggcggcgcggcccgccaccatggagccccagcgccgggagctgctcgcccagtgtcagcagagcctggcccaggccatgacggaggtggaagccgtgctcgggctgctcgaggccgcgggagcgctcagtcccggcgagcggcggcagctggacgaggaggcgggaggcgccaaggcggagctgctgctcaagctgctcttggccaaggagcgggaccacttccaggacctgcgggcggcgctggagaagacgcagcctcacctgctgcccattctctacctgaacggcgtcgtcgggccgccgcagcccgccgaaggcgcgggttctacctacagcgtcctgtccaccatgccctcagactcagaaagcagcagctccctcagcagtgtgggcactaccgggaaggcgccgtccccaccacccctcctcactgaccagcaagtgaatgagaaggtggagaacctctccattcagctgcggctgatgacccgggagagaaacgagctccgcaagcgcctggcctttgctacgcatggcacggcctttgacaagaggccctaccacaggctgaatcctgactatgagaggctgaagatccagtgcgtgcgagccatgtcggacctgcagagcctgcagaaccagcacaccaacgccttgaagaggtgtgaggaggtggccaaggagactgacttctaccacacactccacagccggctcctgagtgaccagactcggctgaaggatgacgtggacatgctgaggcgggagaatgggcagctgctgcgggagcgaaacctgctgcagcagtcatgggaggacatgaagcggctccacgaggaggaccagaaggagatcggtgacctccgtgcccagcagcagcaggtgttgaagcacaacgggtcatccgagattctcaacaaactgtatgacacggccatggacaagttggaggtggtcaagaaggactatgacgcccttcggaagaggtacagtgagaaagtcgccatccacaatgcagacctgagccgcctggagcagctgggggaggagaaccagcggttgctgaagcagacagagatgctgacccagcagagggacacggccatccagctgcagcaccagtgcgccctctccctgaggaggtttgaggcgatccaccatgagctgaacaaggccacggcgcagaacaaggacctgcagtgggagatggagctgctgcagtcagagctgaccgagctgagaaccacgcaggtgaagacagcaaaggagtcggagaaatacagggaggagcgggacgctgtgtacagcgagtacaagctcatcatgagtgagcgtgaccaggtcatctctgagctggacaagctgcagaccgaagtggagctggccgagtccaagctcaagagcagcacatctgagaagaaggcggccaatgaggagatggaggcgctgcggcagatcaaagacacggtgacaatggatgctgggagagccaacaaggaggttgaaatccttcgaaagcagtgcaaggctctgtgccaggagctgaaggaagccctccaggaggcggatgtggccaagtgccggcgggactgggccttccaggagcgagacaagattgtagcagagcgtgacagcatccggacactgtgtgacaacctgaggcgggagcgggaccgtgcggtgagcgagctggctgaggccctgcgcagcctggatgacacccgcaagcagaagaatgatgtcagccgcgagctgaaggagctcaaggaacagatggaatcccagttggaaaaggaggcccggttccgacagctgatggcccacagctcccacgactcggccattgacacggattccatggagtgggaaacggaagttgtagagttcgagagggagacggaggatattgacttgaaggcactggggtttgatatggcagaaggtgtgaatgagccttgtttcccgggggactgtggcatatttgtcactaaagtggacaaaggaagcattgctgatggccgcttaagggtcaatgactggctgctgagaatcaacgatgtggacctcatcaacaaggacaagaagcaggccatcaaggcgctcctcaatggggagggggccatcaacatggtcgtgcggcggaggaagtccctgggtgggaaggtggtcacgccgctgcacatcaacctcagtggacagaaagacagtggcatcagtctggagaatggagtgtatgctgccgctgtgctgcctggaagccctgccgctaaagaagggtcccttgctgtgggagacaggatcgttgcgatcaatggcattgcactggacaacaagtctctgaatgaatgtgaatctctgctgcgcagctgccaggactccctgaccctgtccctcctgaaggtattccctcagagctcctcgtggagtggccagaacatttttgaaaatatcaaagactctgataagatgctgagttttcgagcccatggcccggaggtccaggctcataacaaacggaacttgatacagcacaataactccacgcagacagacatcttctacacggacaggctggaagacaggaaggagccaggccccccaggaggcagcagctcctttctgcataagccattccctgggggacccttgcaggtctgcccccaggcctgtcccagtgcctctgagcgtagcctgagctccttccgctcagatgcctctggggaccgtggctttgggctggtggacgtgcgtggccggcggccactgctgccctttgagaccgaggtgggcccctgtggggttggggaggcctccctggacaaggcagactctgaaggctccaacagcggcgggacctggcccaaggccatgctcagctccacggcagtgcctgagaagctctctgtttataaaaagccaaagcaaagaaagtccatctttgaccctaacactttcaaacgcccccagacaccccccaaaatagactacctgcttccaggtcctgggcctgctcactctccccagccctccaagagggcggggcctctgacacccccaaaacctcccagaaggagcgactccattaagttccagcacaggctggagactagctccgagtcagaagccactctggtgggcagctccccatccactagtcccccgagcgccctgccccctgacgtggaccccggggagcccatgcacgcatcaccccctcgcaaggccagggtccgcattgcttccagctactaccctgaaggagatggggactcctcccacctgccggccaagaaatcctgtgatgaggacctcacctcccagaaggtggatgagctggggcagaagcgtcgccggccaaaatctgctcccagttttcggccgaagcttgctccagtagtgattcctgctcagttcctggaggaacagaagtgtgtcccggccagtggagaactctccccggagctccaggagtgggcaccttactcgcctgggcattccagccggcacagcaaccccccgctataccctagcaggccgtctgtgggcactgttccccggagtttgacccccagcaccactgtgagctccatcctgcggaaccccatctacactgtgcgcagtcacagggtcggcccctgcagctctccacctgcggcccgagatgctggcccccagggtttgcatcccagtgtccagcaccagggacgcctgagcctggacctgagccacaggacctgcagcgactactccgagatgagagccacccatgggtccaactcactgccctccagcgcccgcctgggttcttcgagtaacttgcagttcaaggcggaacgcattaaaatcccatcaacaccaagatatccgcggagtgtcgtgggctccgagagaggttcagtgtcacattctgaatgcagcactcctccacagtcacccctgaacatcgacaccctgtcctcttgtagccagtcccagacctcagcctccacattgcccagaatcgctgtcaaccccgcgtccctcggggagcggagaaaggacaggccttatgtggaggagccacgccacgtgaaggtgcagaagggctcagagccgctgggcatctccatcgtgagtggagagaagggcggcatctacgtctccaaggtgaccgtggggagcatcgctcaccaggctggcctcgagtatggggatcagttactggagttcaacggcataaacctgcggagcgccacggagcagcaggcgcggctcatcatcgggcagcagtgtgataccatcaccatcctggcccagtacaacccccacgtgcaccagctcagcagccactcccggtccagctcacacctggaccctgccggtacccactccactctccagggcagtggcaccaccaccccggagcatccatctgtcatcgacccactgatggagcaggacgaggggcctagcacccccccagccaagcagagcagctccaggattgcgggagatgccaacaagaagaccctggagccacgcgttgtcttcatcaaaaagtcccagctggagcttggggtgcacttgtgtggtgggaacctgcatggggtgtttgtggccgaggtggaggatgacagtcctgccaagggtcctgacggcctcgtgccaggggacctcatcctggagtatggcagcctggacgtgcggaacaagacagtggaggaagtctatgtggagatgctgaagcccagggatggcgtccgcctgaaggtgcagtaccgccctgaggagttcacgaaggccaagggcctgcctggtgacagcttctacatcagggccctgtacgaccggctggcagatgtggagcaagagttgagctttaagaaggacgacatcctctacgtggatgacaccttaccccagggcacgttcgggtcctggatggcttggcagctggacgagaatgcccagaagatccagcgcgggcagattcccagcaaatatgtgatggaccaagaattctccaggaggctcagcatgtctgaagtcaaagatgacaatagcgccacaaagacgctgtcagcggctgcacgccggtccttttttcggaggaaacacaagcacaaacgcagcgggtccaaggacgggaaagacctgctcgccttggatgccttttccagtgactccattccactctttgaagattcggtgagcctggcctatcagcgggtccagaaggtggactgcaccgctctgaggcctgtcctgattctggggcctttgctggacgtggtgaaggagatgctggtgaatgaggctcctggcaagttctgcagatgtccccttgaggtgatgaaggcctcccagcaggccattgagcggggtgtcaaagattgcctgtttgtcgactataagcggagaagcggccatttcgatgtgaccactgtggcgtcaataaaggagatcacagaaaagaaccgacactgcctcctggacattgctccgcacgctattgagcggctccaccacatgcacatctaccccattgtcatcttcatccactacaagagcgccaagcacatcaaggagcagagagaccccatctacctgagggacaaggtgactcagaggcattccaaagagcagtttgaggcggcgcagaagcttgagcaggagtacagcaggtacttcacaggggtcatccagggaggagccctgtcaagcatttgcactcagatcttggcaatggtcaatcaagaacaaaataaagtcctgtggattccagcctgcccgctctaggagaatgctgtgctgtggatgactgcagctggccgcctgaggggacaccagactcagctcttttctagcgactgaaagtagaagtctgtccgtctatgaacatgcgggggaaggatccggaaccaggacccagaagcacctcctttgtagacagagggccacggctgcgtgcgatccaggcccaggcccacacactctgcccgtgtcacacgtgtgctttaacacaaaacagataacactaaagacgggttcagcacccacctttctttagccagctgatcagagatgctgcaaagagaacctttcggatcactcgtttacaagccttttctaagtatttggtggtttatgtttacttgaacggctccatgttgccggtgcccagcccctgtcccctctgtcaaccccctgtcgctttggtgttggtttcgttcccgtcttcagcaaaacgaccttggaacctcaatgggggctgctttgctttgggaggttcttgttggtgggaccagagctttgacaaacctcctgctccttggtggcacctctcctggaaggacgtcacaactccaggtgctcagactgcctgtggcagcagaaccagtgcctttggcattttcctcccacaatggggaaggtgactttggcattcttacaaactcgtctctcggcctttctctcctgccttccacagcctctcgtttctcctccatctgtgcttattacttgaggactgtgtctgctccgtgagagctgcgtgggcagggctgcagtggggtccaggtggtgttcagctgtgctgatgcctgccattgggtcctccttaggctctgtaagtcgtgacagccttcatcagtgcaatgtttgcagggtaattcttaaactttttagagggtggcaggtacatcagttctttttgatatgaaaacattcatgtttcagacattgaattgagagcttttaggggaagcataatggttattgtcactatcaacagtctaaaaagaaaaactgaggtctttttaatcttgattacagcactcacggcatgcaccctactcagtgtgggtgtcttcgtttgggggctttttttttttttgcacttctgaggctagatatgtctggctgaagatttgatgtggttcctccttaagctatgcgtcctgttaataataggtactgtactgggctctgtgtaagtgtcgttggggtaggacctatattttaatactgttcctaacatttcattttactagcgagaaatctttgatttcattttattctttgtaattctagacactagattgtagtttagccataactgatgttttttaaaaagggatatattttcttgcacagttgttcaaaaaagagacaagtttcagtcctcaatgctgtcctttgttttacaggtacaagttttctagctcagacaaactatgaaaaactgtagactattctcaaggtattaactcgcagaccctctgggggtaggggctgttttctaagttacaggcagagtgggactgagatggtacagtgtgcacagacaggtactgagctgacagactgggattttctgtactaaaatgttactttgtatcaaaagttaaacaggctttagtacaacaaataaaggtcaatttctgtaaaaaaaaaaaaaaaa

SEQ ID NO: 153 - protein, 1919 aa, Homo sapiens
MEPQRRELLAQCQQSLAQAMTEVEAVLGLLEAAGALSPGERRQLDEEAGGAKAELLLKLLLAKERDHFQDLRAALEKTQPHLLPILYLNGVVGPPQPAEGAGSTYSVLSTMPSDSESSSSLSSVGTTGKAPSPPPLLTDQQVNEKVENLSIQLRLMTRERNELRKRLAFATHGTAFDKRPYHRLNPDYERLKIQCVRAMSDLQSLQNQHTNALKRCEEVAKETDFYHTLHSRLLSDQTRLKDDVDMLRRENGQLLRERNLLQQSWEDMKRLHEEDQKEIGDLRAQQQQVLKHNGSSEILNKLYDTAMDKLEVVKKDYDALRKRYSEKVAIHNADLSRLEQLGEENQRLLKQTEMLTQQRDTAIQLQHQCALSLRRFEAIHHELNKATAQNKDLQWEMELLQSELTELRTTQVKTAKESEKYREERDAVYSEYKLIMSERDQVISELDKLQTEVELAESKLKSSTSEKKAANEEMEALRQIKDTVTMDAGRANKEVEILRKQCKALCQELKEALQEADVAKCRRDWAFQERDKIVAERDSIRTLCDNLRRERDRAVSELAEALRSLDDTRKQKNDVSRELKELKEQMESQLEKEARFRQLMAHSSHDSAIDTDSMEWETEVVEFERETEDIDLKALGFDMAEGVNEPCFPGDCGIFVTKVDKGSIADGRLRVNDWLLRINDVDLINKDKKQAIKALLNGEGAINMVVRRRKSLGGKVVTPLHINLSGQKDSGISLENGVYAAAVLPGSPAAKEGSLAVGDRIVAINGIALDNKSLNECESLLRSCQDSLTLSLLKVFPQSSSWSGQNIFENIKDSDKMLSFRAHGPEVQAHNKRNLIQHNNSTQTDIFYTDRLEDRKEPGPPGGSSSFLHKPFPGGPLQVCPQACPSASERSLSSFRSDASGDRGFGLVDVRGRRPLLPFETEVGPCGVGEASLDKADSEGSNSGGTWPKAMLSSTAVPEKLSVYKKPKQRKSIFDPNTFKRPQTPPKIDYLLPGPGPAHSPQPSKRAGPLTPPKPPRRSDSIKFQHRLETSSESEATLVGSSPSTSPPSALPPDVDPGEPMHASPPRKARVRIASSYYPEGDGDSSHLPAKKSCDEDLTSQKVDELGQKRRRPKSAPSFRPKLAPVVIPAQFLEEQKCVPASGELSPELQEWAPYSPGHSSRHSNPPLYPSRPSVGTVPRSLTPSTTVSSILRNPIYTVRSHRVGPCSSPPAARDAGPQGLHPSVQHQGRLSLDLSHRTCSDYSEMRATHGSNSLPSSARLGSSSNLQFKAERIKIPSTPRYPRSVVGSERGSVSHSECSTPPQSPLNIDTLSSCSQSQTSASTLPRIAVNPASLGERRKDRPYVEEPRHVKVQKGSEPLGISIVSGEKGGIYVSKVTVGSIAHQAGLEYGDQLLEFNGINLRSATEQQARLIIGQQCDTITILAQYNPHVHQLSSHSRSSSHLDPAGTHSTLQGSGTTTPEHPSVIDPLMEQDEGPSTPPAKQSSSRIAGDANKKTLEPRVVFIKKSQLELGVHLCGGNLHGVFVAEVEDDSPAKGPDGLVPGDLILEYGSLDVRNKTVEEVYVEMLKPRDGVRLKVQYRPEEFTKAKGLPGDSFYIRALYDRLADVEQELSFKKDDILYVDDTLPQGTFGSWMAWQLDENAQKIQRGQIPSKYVMDQEFSRRLSMSEVKDDNSATKTLSAAARRSFFRRKHKHKRSGSKDGKDLLALDAFSSDSIPLFEDSVSLAYQRVQKVDCTALRPVLILGPLLDVVKEMLVNEAPGKFCRCPLEVMKASQQAIERGVKDCLFVDYKRRSGHFDVTTVASIKEITEKNRHCLLDIAPHAIERLHHMHIYPIVIFIHYKSAKHIKEQRDPIYLRDKVTQRHSKEQFEAAQKLEQEYSRYFTGVIQGGALSSICTQILAMVNQEQNKVLWIPACPL

SEQ ID NO: 154 - DNA, 2076 bp, Homo sapiens
  CDS (388)..(1593)
acattctttcagacccggcccgctgcggggcgttcctggggggtagcctcaaggccagcggggttccttcggctgcgtttctgtgggaggccctgaaacgcgcggagcttccctctgcctccaggctttcccagcgagagtgaaattaaacttgaaactcggatcaactggcagtcgttgttggtagaacgccctaaggacccctccccgcgggacggagggaggactcgggacagggaattggccctgggagaaaacgcgcggggggcgtccgagacgccccgtgaaagccgtgccgacccttgggaggactgacaggtctagagacacgcgctgtctgttgtggtgggcctcccgggaataagtgaggggctctgtgtttcgaggatggttctagcgcagagccgggtgtctgccggggtgggctccccgcattgttcgggctccggcgggggcggctctgattcctttccatggcccgcctcccaccccgggaatccccagtgctccttttccacggcttttctggcgtccccccgactctcccgcggcactttggcctaccttcccccagcgccgtggtcctccctggcgaccccctctgcgctcctggggtcctcctgcgccccccctcctccaccggcgcgctgcccacagccgcgtgccctctccccggagctggggaccaaggctgggccccgccggccgcatcggtgggaacttccgcggtccccatcccagggcgcacagggtccagctcctcggcgccgactcctggaaacaatgaaaggtattgttgcagcatctggcagtgagactgaggatgaggacagcatggacattcccttggacctttcttcatccgctggctcaggcaagagaaggagaaggggcaacctacccaaggagtctgtgcagattcttcgggattggctgtatgagcaccgttacaatgcctatccttcagagcaagaaaaagcgttgctgtcccagcaaacacacctgtctacgctacaggtctgtaactggttcatcaacgcccgccgcaggctcctccctgacatgctgagaaaggatggcaaagatccaaatcagttcacaatttcccgccgtggggccaagatttctgaaacgagctctgtggagtccgtgatgggcatcaaaaacttcatgccagctctagaggagaccccatttcattcctgtacagctgggccaaacccaaccctagggaggccactgtctcctaagccgtcatccccgggatcagttttggctcgtccatcagtgatctgccataccactgtgactgcattgaaagatgtccctttctctctctgccagtcggtcggtgtgggacaaaacacagatatacagcagatagcggccaaaaacttcacagacacctctctcatgtacccagaggacacttgtaaatctggaccaagtacgaatacacagagtggtcttttcaacactcctccccctactccaccggacctcaaccaggacttcagtggatttcagcttctagtggatgttgcactcaaacgggctgcagagatggagcttcaggcaaaacttacagcttaacccattttcaagcaaaacagttctcagaaatgtcatgattgccggggtgaaggcaagagatgaattgcattattttatatattttttattaatatttgcacatgggattgctaaaacagcttcctgttactgagatgtcttcaatggaatacagtcattccaagaactataaacttaaagctactgtagaaacaaagggttttcttttttaaatgtttcttggtagattattcataatgtgagatggttcccaatatcatgtgattttttttttcctccccttccctttttttgttattttttcagactgtgcaatacttagagaacctatagcatcttctcattcccatgtggaacaggatgcccacatactgtctaattaataaattttccattttttttcaaacaagtatgaatctagttggttgatgccttttttttcatgacataataaagtattttctttaaaaaaaaaaaaaaaaa

SEQ ID NO: 155 - protein, 401 aa, Homo sapiens
MVLAQSRVSAGVGSPHCSGSGGGGSDSFPWPASHPGNPQCSFSTAFLASPRLSRGTLAYLPPAPWSSLATPSALLGSSCAPPPPPARCPQPRALSPELGTKAGPRRPHRWELPRSPSQGAQGPAPRRRLLETMKGIVAASGSETEDEDSMDIPLDLSSSAGSGKRRRRGNLPKESVQILRDWLYEHRYNAYPSEQEKALLSQQTHLSTLQVCNWFINARRRLLPDMLRKDGKDPNQFTISRRGAKISETSSVESVMGIKNFMPALEETPFHSCTAGPNPTLGRPLSPKPSSPGSVLARPSVICHTTVTALKDVPFSLCQSVGVGQNTDIQQIAAKNFTDTSLMYPEDTCKSGPSTNTQSGLFNTPPPTPPDLNQDFSGFQLLVDVALKRAAEMELQAKLTA

SEQ ID NO: 156 - DNA, 1474 bp, Homo sapiens
  CDS (131)..(991)
agcgttggctggggggaggcagtgggggtgcatctacgggagcggttgggctgtaagctttcgctacatcacagaattgtgccagtgtttctctttggagtgcctcgccagctttaacaaccgtttggatatgacttgctcgggcaaaagttgtgcattggcccgatcaagcctgacttctagccaaggtattgttgcagcatctggcagtgagactgaggatgaggacagcatggacattcccttggacctttcttcatccgctggctcaggcaagagaaggagaaggggcaacctacccaaggagtctgtgcagattcttcgggattggctgtatgagcaccgttacaatgcctatccttcagagcaagaaaaagcgttgctgtcccagcaaacacacctgtctacgctacaggtctgtaactggttcatcaacgcccgccgcaggctcctccctgacatgctgagaaaggatggcaaagatccaaatcagttcacaatttcccgccgtggggccaagatttctgaaacgagctctgtggagtccgtgatgggcatcaaaaacttcatgccagctctagaggagaccccatttcattcctgtacagctgggccaaacccaaccctagggaggccactgtctcctaagccgtcatccccgggatcagttttggctcgtccatcagtgatctgccataccactgtgactgcattgaaagatgtccctttctctctctgccagtcggtcggtgtgggacaaaacacagatatacagcagatagcggccaaaaacttcacagacacctctctcatgtacccagaggacacttgtaaatctggaccaagtacgaatacacagagtggtcttttcaacactcctccccctactccaccggacctcaaccaggacttcagtggatttcagcttctagtggatgttgcactcaaacgggctgcagagatggagcttcaggcaaaacttacagcttaacccattttcaagcaaaacagttctcagaaatgtcatgattgccggggtgaaggcaagagatgaattgcattattttatatattttttattaatatttgcacatgggattgctaaaacagcttcctgttactgagatgtcttcaatggaatacagtcattccaagaactataaacttaaagctactgtagaaacaaagggttttcttttttaaatgtttcttggtagattattcataatgtgagatggttcccaatatcatgtgattttttttttcctccccttccctttttttgttattttttcagactgtgcaatacttagagaacctatagcatcttctcattcccatgtggaacaggatgcccacatactgtctaattaataaattttccattttttttcaaacaagtatgaatctagttggttgatgccttttttttcatgacataataaagtattttctttaaaaaaaaaaaaaaaaa

SEQ ID NO: 157 - protein, 286 aa, Homo sapiens
MTCSGKSCALARSSLTSSQGIVAASGSETEDEDSMDIPLDLSSSAGSGKRRRRGNLPKESVQILRDWLYEHRYNAYPSEQEKALLSQQTHLSTLQVCNWFINARRRLLPDMLRKDGKDPNQFTISRRGAKISETSSVESVMGIKNFMPALEETPFHSCTAGPNPTLGRPLSPKPSSPGSVLARPSVICHTTVTALKDVPFSLCQSVGVGQNTDIQQIAAKNFTDTSLMYPEDTCKSGPSTNTQSGLFNTPPPTPPDLNQDFSGFQLLVDVALKRAAEMELQAKLTA

SEQ ID NO: 158 - DNA, 1508 bp, Homo sapiens
  CDS (207)..(1025)
gcggccgccgcgctcggtccagtcttcccggctggaaggagcgggcgcctgggatcagagcgtcctgtttagcaataacggctggagcacgtcctacaagttacgggagagtcggctgtgaaggagacgttcgcttatcccctgtgtccccgctcctggcccctccagacccccgccttgcctcgcgctgggaggggagatccagaatgaaaggcaagaaaggtattgttgcagcatctggcagtgagactgaggatgaggacagcatggacattcccttggacctttcttcatccgctggctcaggcaagagaaggagaaggggcaacctacccaaggagtctgtgcagattcttcgggattggctgtatgagcaccgttacaatgcctatccttcagagcaagaaaaagcgttgctgtcccagcaaacacacctgtctacgctacaggtctgtaactggttcatcaacgcccgccgcaggctcctccctgacatgctgagaaaggatggcaaagatccaaatcagttcacaatttcccgccgtggggccaagatttctgaaacgagctctgtggagtccgtgatgggcatcaaaaacttcatgccagctctagaggagaccccatttcattcctgtacagctgggccaaacccaaccctagggaggccactgtctcctaagccgtcatccccgggatcagttttggctcgtccatcagtgatctgccataccactgtgactgcattgaaagatgtccctttctctctctgccagtcggtcggtgtgggacaaaacacagatatacagcagatagcggccaaaaacttcacagacacctctctcatgtacccagaggacacttgtaaatctggaccaagtacgaatacacagagtggtcttttcaacactcctccccctactccaccggacctcaaccaggacttcagtggatttcagcttctagtggatgttgcactcaaacgggctgcagagatggagcttcaggcaaaacttacagcttaacccattttcaagcaaaacagttctcagaaatgtcatgattgccggggtgaaggcaagagatgaattgcattattttatatattttttattaatatttgcacatgggattgctaaaacagcttcctgttactgagatgtcttcaatggaatacagtcattccaagaactataaacttaaagctactgtagaaacaaagggttttcttttttaaatgtttcttggtagattattcataatgtgagatggttcccaatatcatgtgattttttttttcctccccttccctttttttgttattttttcagactgtgcaatacttagagaacctatagcatcttctcattcccatgtggaacaggatgcccacatactgtctaattaataaattttccattttttttcaaacaagtatgaatctagttggttgatgccttttttttcatgacataataaagtattttctttaaaaaaaaaaaaaaaaa

SEQ ID NO: 159 - protein, 272 aa, Homo sapiens
MKGKKGIVAASGSETEDEDSMDIPLDLSSSAGSGKRRRRGNLPKESVQILRDWLYEHRYNAYPSEQEKALLSQQTHLSTLQVCNWFINARRRLLPDMLRKDGKDPNQFTISRRGAKISETSSVESVMGIKNFMPALEETPFHSCTAGPNPTLGRPLSPKPSSPGSVLARPSVICHTTVTALKDVPFSLCQSVGVGQNTDIQQIAAKNFTDTSLMYPEDTCKSGPSTNTQSGLFNTPPPTPPDLNQDFSGFQLLVDVALKRAAEMELQAKLTA

SEQ ID NO: 160 - DNA, 1618 bp, Homo sapiens
  CDS (317)..(1135)
tctgacagcgccgaggtgcgccgagcaggagcagggaacaaaggagcggagaggggaggggagagagttgggcgagggagagcccccggccggctgccagaagatcccggcgggaggaagcccaagtgtcacttgaattccacccaaggagcgggcgcctgggatcagagcgtcctgtttagcaataacggctggagcacgtcctacaagttacgggagagtcggctgtgaaggagacgttcgcttatcccctgtgtccccgctcctggcccctccagacccccgccttgcctcgcgctgggaggggagatccagaatgaaaggcaagaaaggtattgttgcagcatctggcagtgagactgaggatgaggacagcatggacattcccttggacctttcttcatccgctggctcaggcaagagaaggagaaggggcaacctacccaaggagtctgtgcagattcttcgggattggctgtatgagcaccgttacaatgcctatccttcagagcaagaaaaagcgttgctgtcccagcaaacacacctgtctacgctacaggtctgtaactggttcatcaacgcccgccgcaggctcctccctgacatgctgagaaaggatggcaaagatccaaatcagttcacaatttcccgccgtggggccaagatttctgaaacgagctctgtggagtccgtgatgggcatcaaaaacttcatgccagctctagaggagaccccatttcattcctgtacagctgggccaaacccaaccctagggaggccactgtctcctaagccgtcatccccgggatcagttttggctcgtccatcagtgatctgccataccactgtgactgcattgaaagatgtccctttctctctctgccagtcggtcggtgtgggacaaaacacagatatacagcagatagcggccaaaaacttcacagacacctctctcatgtacccagaggacacttgtaaatctggaccaagtacgaatacacagagtggtcttttcaacactcctccccctactccaccggacctcaaccaggacttcagtggatttcagcttctagtggatgttgcactcaaacgggctgcagagatggagcttcaggcaaaacttacagcttaacccattttcaagcaaaacagttctcagaaatgtcatgattgccggggtgaaggcaagagatgaattgcattattttatatattttttattaatatttgcacatgggattgctaaaacagcttcctgttactgagatgtcttcaatggaatacagtcattccaagaactataaacttaaagctactgtagaaacaaagggttttcttttttaaatgtttcttggtagattattcataatgtgagatggttcccaatatcatgtgattttttttttcctccccttccctttttttgttattttttcagactgtgcaatacttagagaacctatagcatcttctcattcccatgtggaacaggatgcccacatactgtctaattaataaattttccattttttttcaaacaagtatgaatctagttggttgatgccttttttttcatgacataataaagtattttctttaaaaaaaaaaaaaaaaa

SEQ ID NO: 161 - protein, 272 aa, Homo sapiens; identical to SEQ ID NO: 159

SEQ ID NO: 162 - DNA, 1382 bp, Homo sapiens
  CDS (141)..(899)
gtttctggacccggccaccccccgcgtccgcaccgccgcccccgagggacgagtgacagcggccgccgcgctcggtccagtcttcccggctggaaggtattgttgcagcatctggcagtgagactgaggatgaggacagcatggacattcccttggacctttcttcatccgctggctcaggcaagagaaggagaaggggcaacctacccaaggagtctgtgcagattcttcgggattggctgtatgagcaccgttacaatgcctatccttcagagcaagaaaaagcgttgctgtcccagcaaacacacctgtctacgctacaggtctgtaactggttcatcaacgcccgccgcaggctcctccctgacatgctgagaaaggatggcaaagatccaaatcagttcacaatttcccgccgtggggccaagatttctgaaacgagctctgtggagtccgtgatgggcatcaaaaacttcatgccagctctagaggagaccccatttcattcctgtacagctgggccaaacccaaccctagggaggccactgtctcctaagccgtcatccccgggatcagttttggctcgtccatcagtgatctgccataccactgtgactgcattgaaagatgtccctttctctctctgccagtcggtcggtgtgggacaaaacacagatatacagcagatagcggccaaaaacttcacagacacctctctcatgtacccagaggacacttgtaaatctggaccaagtacgaatacacagagtggtcttttcaacactcctccccctactccaccggacctcaaccaggacttcagtggatttcagcttctagtggatgttgcactcaaacgggctgcagagatggagcttcaggcaaaacttacagcttaacccattttcaagcaaaacagttctcagaaatgtcatgattgccggggtgaaggcaagagatgaattgcattattttatatattttttattaatatttgcacatgggattgctaaaacagcttcctgttactgagatgtcttcaatggaatacagtcattccaagaactataaacttaaagctactgtagaaacaaagggttttcttttttaaatgtttcttggtagattattcataatgtgagatggttcccaatatcatgtgattttttttttcctccccttccctttttttgttattttttcagactgtgcaatacttagagaacctatagcatcttctcattcccatgtggaacaggatgcccacatactgtctaattaataaattttccattttttttcaaacaagtatgaatctagttggttgatgccttttttttcatgacataataaagtattttctttaaaaaaaaaaaaaaaaa

SEQ ID NO: 163 - protein, 252 aa, Homo sapiens
MDIPLDLSSSAGSGKRRRRGNLPKESVQILRDWLYEHRYNAYPSEQEKALLSQQTHLSTLQVCNWFINARRRLLPDMLRKDGKDPNQFTISRRGAKISETSSVESVMGIKNFMPALEETPFHSCTAGPNPTLGRPLSPKPSSPGSVLARPSVICHTTVTALKDVPFSLCQSVGVGQNTDIQQIAAKNFTDTSLMYPEDTCKSGPSTNTQSGLFNTPPPTPPDLNQDFSGFQLLVDVALKRAAEMELQAKLTA

SEQ ID NO: 164 - DNA, 1469 bp, Homo sapiens
  CDS (228)..(986)
acattctttcagacccggcccgctgcggggcgttcctggggggtagcctcaaggccagcggggttccttcggctgcgtttctgtgggaggccctgaaacgcgcggagcttccctctgcctccaggctttcccagcgagagtgaaattaaacttgaaactcggatcaactggcagtcgttgttggtattgttgcagcatctggcagtgagactgaggatgaggacagcatggacattcccttggacctttcttcatccgctggctcaggcaagagaaggagaaggggcaacctacccaaggagtctgtgcagattcttcgggattggctgtatgagcaccgttacaatgcctatccttcagagcaagaaaaagcgttgctgtcccagcaaacacacctgtctacgctacaggtctgtaactggttcatcaacgcccgccgcaggctcctccctgacatgctgagaaaggatggcaaagatccaaatcagttcacaatttcccgccgtggggccaagatttctgaaacgagctctgtggagtccgtgatgggcatcaaaaacttcatgccagctctagaggagaccccatttcattcctgtacagctgggccaaacccaaccctagggaggccactgtctcctaagccgtcatccccgggatcagttttggctcgtccatcagtgatctgccataccactgtgactgcattgaaagatgtccctttctctctctgccagtcggtcggtgtgggacaaaacacagatatacagcagatagcggccaaaaacttcacagacacctctctcatgtacccagaggacacttgtaaatctggaccaagtacgaatacacagagtggtcttttcaacactcctccccctactccaccggacctcaaccaggacttcagtggatttcagcttctagtggatgttgcactcaaacgggctgcagagatggagcttcaggcaaaacttacagcttaacccattttcaagcaaaacagttctcagaaatgtcatgattgccggggtgaaggcaagagatgaattgcattattttatatattttttattaatatttgcacatgggattgctaaaacagcttcctgttactgagatgtcttcaatggaatacagtcattccaagaactataaacttaaagctactgtagaaacaaagggttttcttttttaaatgtttcttggtagattattcataatgtgagatggttcccaatatcatgtgattttttttttcctccccttccctttttttgttattttttcagactgtgcaatacttagagaacctatagcatcttctcattcccatgtggaacaggatgcccacatactgtctaattaataaattttccattttttttcaaacaagtatgaatctagttggttgatgccttttttttcatgacataataaagtattttctttaaaaaaaaaaaaaaaaa

SEQ ID NO: 165 - protein, 252 aa, Homo sapiens; identical to SEQ ID NO: 163

SEQ ID NO: 166 - DNA, 1369 bp, Homo sapiens
  CDS (128)..(886)
cacaacatttccttgtatgtggatagcgtgaaagaagcttgtgatcctgcccccaccctccccaccgccacattttttaaagtgtattgttgcagcatctggcagtgagactgaggatgaggacagcatggacattcccttggacctttcttcatccgctggctcaggcaagagaaggagaaggggcaacctacccaaggagtctgtgcagattcttcgggattggctgtatgagcaccgttacaatgcctatccttcagagcaagaaaaagcgttgctgtcccagcaaacacacctgtctacgctacaggtctgtaactggttcatcaacgcccgccgcaggctcctccctgacatgctgagaaaggatggcaaagatccaaatcagttcacaatttcccgccgtggggccaagatttctgaaacgagctctgtggagtccgtgatgggcatcaaaaacttcatgccagctctagaggagaccccatttcattcctgtacagctgggccaaacccaaccctagggaggccactgtctcctaagccgtcatccccgggatcagttttggctcgtccatcagtgatctgccataccactgtgactgcattgaaagatgtccctttctctctctgccagtcggtcggtgtgggacaaaacacagatatacagcagatagcggccaaaaacttcacagacacctctctcatgtacccagaggacacttgtaaatctggaccaagtacgaatacacagagtggtcttttcaacactcctccccctactccaccggacctcaaccaggacttcagtggatttcagcttctagtggatgttgcactcaaacgggctgcagagatggagcttcaggcaaaacttacagcttaacccattttcaagcaaaacagttctcagaaatgtcatgattgccggggtgaaggcaagagatgaattgcattattttatatattttttattaatatttgcacatgggattgctaaaacagcttcctgttactgagatgtcttcaatggaatacagtcattccaagaactataaacttaaagctactgtagaaacaaagggttttcttttttaaatgtttcttggtagattattcataatgtgagatggttcccaatatcatgtgattttttttttcctccccttccctttttttgttattttttcagactgtgcaatacttagagaacctatagcatcttctcattcccatgtggaacaggatgcccacatactgtctaattaataaattttccattttttttcaaacaagtatgaatctagttggttgatgccttttttttcatgacataataaagtattttctttaaaaaaaaaaaaaaaaa

SEQ ID NO: 167 - protein, 252 aa, Homo sapiens; identical to SEQ ID NO: 163

SEQ ID NO: 168 - DNA, 1540 bp, Homo sapiens
  CDS (299)..(1057)
caaaggccaggcctgacggaagagcccagccttcgccgagggccgcagggagccagagactcgagcctgcggttccagccccgccgcggttccggccccgccgcgatcccgaggcctgcgcatgctcggtgctgcgcggggctccctccttaccgcaggagctcctcatcgagaaacccaggttggtgtcttttccacgtggtagaagctggctaacctccacttccacattccagcccaagggaaagtccaaggtattgttgcagcatctggcagtgagactgaggatgaggacagcatggacattcccttggacctttcttcatccgctggctcaggcaagagaaggagaaggggcaacctacccaaggagtctgtgcagattcttcgggattggctgtatgagcaccgttacaatgcctatccttcagagcaagaaaaagcgttgctgtcccagcaaacacacctgtctacgctacaggtctgtaactggttcatcaacgcccgccgcaggctcctccctgacatgctgagaaaggatggcaaagatccaaatcagttcacaatttcccgccgtggggccaagatttctgaaacgagctctgtggagtccgtgatgggcatcaaaaacttcatgccagctctagaggagaccccatttcattcctgtacagctgggccaaacccaaccctagggaggccactgtctcctaagccgtcatccccgggatcagttttggctcgtccatcagtgatctgccataccactgtgactgcattgaaagatgtccctttctctctctgccagtcggtcggtgtgggacaaaacacagatatacagcagatagcggccaaaaacttcacagacacctctctcatgtacccagaggacacttgtaaatctggaccaagtacgaatacacagagtggtcttttcaacactcctccccctactccaccggacctcaaccaggacttcagtggatttcagcttctagtggatgttgcactcaaacgggctgcagagatggagcttcaggcaaaacttacagcttaacccattttcaagcaaaacagttctcagaaatgtcatgattgccggggtgaaggcaagagatgaattgcattattttatatattttttattaatatttgcacatgggattgctaaaacagcttcctgttactgagatgtcttcaatggaatacagtcattccaagaactataaacttaaagctactgtagaaacaaagggttttcttttttaaatgtttcttggtagattattcataatgtgagatggttcccaatatcatgtgattttttttttcctccccttccctttttttgttattttttcagactgtgcaatacttagagaacctatagcatcttctcattcccatgtggaacaggatgcccacatactgtctaattaataaattttccattttttttcaaacaagtatgaatctagttggttgatgccttttttttcatgacataataaagtattttctttaaaaaaaaaaaaaaaaa

SEQ ID NO: 169 - protein, 252 aa, Homo sapiens; identical to SEQ ID NO: 163

SEQ ID NO: 170 - DNA, 1255 bp, Homo sapiens
  CDS (175)..(732)
ggaggccggggcggggcgggcgcagccggcgctgagcttgcagggccgctcccctcacccgcccccttcgagtccccgggcttcgccccacccggcccgtgggggagtatctgtcctgccgccttcgcccacgccctgcactccgggaccgtccctgcgcgctctgggcgcaccatggcccgcggggctgcgctggcgctgctgctcttcggcctgctgggtgttctggtcgccgccccggatggtggtttcgatttatccgatgcccttcctgacaatgaaaacaagaaacccactgcaatccccaagaaacccagtgctggggatgactttgacttaggagatgctgttgttgatggagaaaatgacgacccacgaccaccgaacccacccaaaccgatgccaaatccaaaccccaaccaccctagttcctccggtagcttttcagatgctgaccttgcggatggcgtttcaggtggagaaggaaaaggaggcagtgatggtggaggcagccacaggaaagaaggggaagaggccgacgccccaggcgtgatccccgggattgtgggggctgtcgtggtcgccgtggctggagccatctctagcttcattgcttaccagaaaaagaagctatgcttcaaagaaaatgcagaacaaggggaggtggacatggagagccaccggaatgccaacgcagagccagctgttcagcgtactcttttagagaaatagaagattgtcggcagaaacagcccaggcgttggcagcagggttagaacagctgcctgaggctcctccctgaaggacacctgcctgagagcagagatggaggccttctgttcacggcggattctttgttttaatcttgcgatgtgctttgcttgttgctgggcggatgatgtttactaacgatgaattttacatccaaagggggataggcacttggacccccattctccaaggcccgggggggcggtttcccatgggatgtgaaaggctggccattattaagtccctgtaactcaaatgtcaaccccaccgaggcacccccccgtcccccagaatcttggctgtttacaaatcacgtgtccatcgagcacgtctgaaacccctggtagccccgacttctttttaattaaaataaggtaagcccttcaatttgtttcttcaatatttctttcatttgtagggatatttgtttttcatatcagactaataaaaagaaattagaaaccaaaaaaaaaaaaaaaaaaaa

SEQ ID NO: 171 - protein, 185 aa, Homo sapiens
MARGAALALLLFGLLGVLVAAPDGGFDLSDALPDNENKKPTAIPKKPSAGDDFDLGDAVVDGENDDPRPPNPPKPMPNPNPNHPSSSGSFSDADLADGVSGGEGKGGSDGGGSHRKEGEEADAPGVIPGIVGAVVVAVAGAISSFIAYQKKKLCFKENAEQGEVDMESHRNANAEPAVQRTLLEK

SEQ ID NO: 172 - DNA, 3913 bp, Homo sapiens
  CDS (562)..(2862)
ctttcactggcaagagacggagtcctgggtttcagttccagttgcctgcggtgggctgtgtgagtttgccaaagtcccctgccctctctgggtctcggttccctcgcctgtccacgtgaggttggaggagctgaacgccgacgtcatttttagctaagagggagcagggtccccgagtcgccggcccagggtctgcgcatccgaggccgcgcgccctttcccctcccccacggctcctccgggccccgcactctgcgccccggctgccgcccagcgccctacaccgccctcagggggccctcgcgggctccccccggccgggatgccagtgccccgcgccacgcgcgcctgctcccgcgccgcctgccctgcagcctgcccgcggcgcctttatacccagcgggctcggcgctcactaatgtttaactcggggccgaaacttgccagcggcgagtgactccaccgcccggagcagcggtgcaggacgcgcgtctccgccgcccgcggtgacttctgcctgcgctccttctctgaacgctcacttccgaggagacgccgacgatgaagacaccgtggaaggttcttctgggactgctgggtgctgctgcgcttgtcaccatcatcaccgtgcccgtggttctgctgaacaaaggcacagatgatgctacagctgacagtcgcaaaacttacactctaactgattacttaaaaaatacttatagactgaagttatactccttaagatggatttcagatcatgaatatctctacaaacaagaaaataatatcttggtattcaatgctgaatatggaaacagctcagttttcttggagaacagtacatttgatgagtttggacattctatcaatgattattcaatatctcctgatgggcagtttattctcttagaatacaactacgtgaagcaatggaggcattcctacacagcttcatatgacatttatgatttaaataaaaggcagctgattacagaagagaggattccaaacaacacacagtgggtcacatggtcaccagtgggtcataaattggcatatgtttggaacaatgacatttatgttaaaattgaaccaaatttaccaagttacagaatcacatggacggggaaagaagatataatatataatggaataactgactgggtttatgaagaggaagtcttcagtgcctactctgctctgtggtggtctccaaacggcacttttttagcatatgcccaatttaacgacacagaagtcccacttattgaatactccttctactctgatgagtcactgcagtacccaaagactgtacgggttccatatccaaaggcaggagctgtgaatccaactgtaaagttctttgttgtaaatacagactctctcagctcagtcaccaatgcaacttccatacaaatcactgctcctgcttctatgttgataggggatcactacttgtgtgatgtgacatgggcaacacaagaaagaatttctttgcagtggctcaggaggattcagaactattcggtcatggatatttgtgactatgatgaatccagtggaagatggaactgcttagtggcacggcaacacattgaaatgagtactactggctgggttggaagatttaggccttcagaacctcattttacccttgatggtaatagcttctacaagatcatcagcaatgaagaaggttacagacacatttgctatttccaaatagataaaaaagactgcacatttattacaaaaggcacctgggaagtcatcgggatagaagctctaaccagtgattatctatactacattagtaatgaatataaaggaatgccaggaggaaggaatctttataaaatccaacttagtgactatacaaaagtgacatgcctcagttgtgagctgaatccggaaaggtgtcagtactattctgtgtcattcagtaaagaggcgaagtattatcagctgagatgttccggtcctggtctgcccctctatactctacacagcagcgtgaatgataaagggctgagagtcctggaagacaattcagctttggataaaatgctgcagaatgtccagatgccctccaaaaaactggacttcattattttgaatgaaacaaaattttggtatcagatgatcttgcctcctcattttgataaatccaagaaatatcctctactattagatgtgtatgcaggcccatgtagtcaaaaagcagacactgtcttcagactgaactgggccacttaccttgcaagcacagaaaacattatagtagctagctttgatggcagaggaagtggttaccaaggagataagatcatgcatgcaatcaacagaagactgggaacatttgaagttgaagatcaaattgaagcagccagacaattttcaaaaatgggatttgtggacaacaaacgaattgcaatttggggctggtcatatggagggtacgtaacctcaatggtcctgggatcgggaagtggcgtgttcaagtgtggaatagccgtggcgcctgtatcccggtgggagtactatgactcagtgtacacagaacgttacatgggtctcccaactccagaagacaaccttgaccattacagaaattcaacagtcatgagcagagctgaaaattttaaacaagttgagtacctccttattcatggaacagcagatgataacgttcactttcagcagtcagctcagatctccaaagccctggtcgatgttggagtggatttccaggcaatgtggtatactgatgaagaccatggaatagctagcagcacagcacaccaacatatatatacccacatgagccacttcataaaacaatgtttctctttaccttagcacctcaaaataccatgccatttaaagcttattaaaactcatttttgttttcattatctcaaaactgcactgtcaagatgatgatgatctttaaaatacacactcaaatcaagaaacttaaggttacctttgttcccaaatttcatacctatcatcttaagtagggacttctgtcttcacaacagattattaccttacagaagtttgaattatccggtcgggttttattgtttaaaatcatttctgcatcagctgctgaaacaacaaataggaattgtttttatggaggctttgcatagattccctgagcaggattttaatctttttctaactggactggttcaaatgttgttctcttctttaaagggatggcaagatgtgggcagtgatgtcactagggcagggacaggataagagggattagggagagaagatagcagggcatggctgggaacccaagtccaagcataccaacacgagcaggctactgtcagctcccctcggagaagagctgttcacagccagactggcacagttttctgagaaagactattcaaacagtctcaggaaatcaaatatgcaaagcactgacttctaagtaaaaccacagcagttgaaaagactccaaagaaatgtaagggaaactgccagcaacgcaggcccccaggtgccagttatggctataggtgctacaaaaacacagcaagggtgatgggaaagcattgtaaatgtgcttttaaaaaaaaatactgatgttcctagtgaaagaggcagcttgaaactgagatgtgaacacatcagcttgccctgttaaaagatgaaaatatttgtatcacaaatcttaacttgaaggagtccttgcatcaatttttcttatttcatttctttgagtgtcttaattaaaagaatattttaacttccttggactcattttaaaaaatggaacataaaatacaatgttatgtattattattcccattctacatactatggaatttctcccagtcatttaataaatgtgccttcattttttcagaaaaaaaaaaaaaaa

SEQ ID NO: 173 - protein, 766 aa, Homo sapiens
MKTPWKVLLGLLGAAALVTIITVPVVLLNKGTDDATADSRKTYTLTDYLKNTYRLKLYSLRWISDHEYLYKQENNILVFNAEYGNSSVFLENSTFDEFGHSINDYSISPDGQFILLEYNYVKQWRHSYTASYDIYDLNKRQLITEERIPNNTQWVTWSPVGHKLAYVWNNDIYVKIEPNLPSYRITWTGKEDIIYNGITDWVYEEEVFSAYSALWWSPNGTFLAYAQFNDTEVPLIEYSFYSDESLQYPKTVRVPYPKAGAVNPTVKFFVVNTDSLSSVTNATSIQITAPASMLIGDHYLCDVTWATQERISLQWLRRIQNYSVMDICDYDESSGRWNCLVARQHIEMSTTGWVGRFRPSEPHFTLDGNSFYKIISNEEGYRHICYFQIDKKDCTFITKGTWEVIGIEALTSDYLYYISNEYKGMPGGRNLYKIQLSDYTKVTCLSCELNPERCQYYSVSFSKEAKYYQLRCSGPGLPLYTLHSSVNDKGLRVLEDNSALDKMLQNVQMPSKKLDFIILNETKFWYQMILPPHFDKSKKYPLLLDVYAGPCSQKADTVFRLNWATYLASTENIIVASFDGRGSGYQGDKIMHAINRRLGTFEVEDQIEAARQFSKMGFVDNKRIAIWGWSYGGYVTSMVLGSGSGVFKCGIAVAPVSRWEYYDSVYTERYMGLPTPEDNLDHYRNSTVMSRAENFKQVEYLLIHGTADDNVHFQQSAQISKALVDVGVDFQAMWYTDEDHGIASSTAHQHIYTHMSHFIKQCFSLP

SEQ ID NO: 174 - DNA, 1660 bp, Homo sapiens
  CDS (294)..(1073)
ggtgcactagcaaaacaaacttattttgaacactcagctcctagcgtgcggcgctgccaatcattaacctcctggtgcaagtggcgcggcctgtgccctttataaggtgcgcgctgtgtccagcgagcatcggccaccgccatcccatccagcgagcatctgccgccgcgccgccgccaccctcccagagagcactggccaccgctccaccatcacttgcccagagtttgggccaccgcccgccgccaccagcccagagagcatcggcccctgtctgctgctcgcgcctggagatgtcagaggtccccgttgctcgcgtctggctggtactgctcctgctgactgtccaggtcggcgtgacagccggcgctccgtggcagtgcgcgccctgctccgccgagaagctcgcgctctgcccgccggtgtccgcctcgtgctcggaggtcacccggtccgccggctgcggctgttgcccgatgtgcgccctgcctctgggcgccgcgtgcggcgtggcgactgcacgctgcgcccggggactcagttgccgcgcgctgccgggggagcagcaacctctgcacgccctcacccgcggccaaggcgcctgcgtgcaggagtctgacgcctccgctccccatgctgcagaggcagggagccctgaaagcccagagagcacggagataactgaggaggagctcctggataatttccatctgatggccccttctgaagaggatcattccatcctttgggacgccatcagtacctatgatggctcgaaggctctccatgtcaccaacatcaaaaaatggaaggagccctgccgaatagaactctacagagtcgtagagagtttagccaaggcacaggagacatcaggagaagaaatttccaaattttacctgccaaactgcaacaagaatggattttatcacagcagacagtgtgagacatccatggatggagaggcgggactctgctggtgcgtctacccttggaatgggaagaggatccctgggtctccagagatcaggggagaccccaactgccagatatattttaatgtacaaaactgaaaccagatgaaataatgttctgtcacgtgaaatatttaagtatatagtatatttatactctagaacatgcacatttatatatatatgtatatgtatatatatatagtaactactttttatactccatacataacttgatatagaaagctgtttatttattcactgtaagtttattttttctacacagtaaaaacttgtactatgttaataacttgtcctatgtcaatttgtatatcatgaaacacttctcatcatattgtatgtaagtaattgcatttctgctcttccaaagctcctgcgtctgtttttaaagagcatggaaaaatactgcctagaaaatgcaaaatgaaataagagagagtagtttttcagctagtttgaaggaggacggttaacttgtatattccaccattcacatttgatgtacatgtgtagggaaagttaaaagtgttgattacataatcaaagctacctgtggtgatgttgccacctgttaaaatgtacactggatatgttgttaaacacgtgtctataatggaaacatttacaataaatattctgcatggaaatactgttaaaaaaaaaaa

SEQ ID NO: 175 - protein, 259 aa, Homo sapiens
MSEVPVARVWLVLLLLTVQVGVTAGAPWQCAPCSAEKLALCPPVSASCSEVTRSAGCGCCPMCALPLGAACGVATARCARGLSCRALPGEQQPLHALTRGQGACVQESDASAPHAAEAGSPESPESTEITEEELLDNFHLMAPSEEDHSILWDAISTYDGSKALHVTNIKKWKEPCRIELYRVVESLAKAQETSGEEISKFYLPNCNKNGFYHSRQCETSMDGEAGLCWCVYPWNGKRIPGSPEIRGDPNCQIYFNVQN

SEQ ID NO: 176 - DNA, 1606 bp, Homo sapiens
  CDS (294)..(1019)
ggtgcactagcaaaacaaacttattttgaacactcagctcctagcgtgcggcgctgccaatcattaacctcctggtgcaagtggcgcggcctgtgccctttataaggtgcgcgctgtgtccagcgagcatcggccaccgccatcccatccagcgagcatctgccgccgcgccgccgccaccctcccagagagcactggccaccgctccaccatcacttgcccagagtttgggccaccgcccgccgccaccagcccagagagcatcggcccctgtctgctgctcgcgcctggagatgtcagaggtccccgttgctcgcgtctggctggtactgctcctgctgactgtccaggtcggcgtgacagccggcgctccgtggcagtgcgcgccctgctccgccgagaagctcgcgctctgcccgccggtgtccgcctcgtgctcggaggtcacccggtccgccggctgcggctgttgcccgatgtgcgccctgcctctgggcgccgcgtgcggcgtggcgactgcacgctgcgcccggggactcagttgccgcgcgctgccgggggagcagcaacctctgcacgccctcacccgcggccaaggcgcctgcgtgcaggagtctgacgcctccgctccccatgctgcagaggcagggagccctgaaagcccagagagcacggagataactgaggaggagctcctggataatttccatctgatggccccttctgaagaggatcattccatcctttgggacgccatcagtacctatgatggctcgaaggctctccatgtcaccaacatcaacaaggcacaggagacatcaggagaagaaatttccaaattttacctgccaaactgcaacaagaatggattttatcacagcagacagtgtgagacatccatggatggagaggcgggactctgctggtgcgtctacccttggaatgggaagaggatccctgggtctccagagatcaggggagaccccaactgccagatatattttaatgtacaaaactgaaaccagatgaaataatgttctgtcacgtgaaatatttaagtatatagtatatttatactctagaacatgcacatttatatatatatgtatatgtatatatatatagtaactactttttatactccatacataacttgatatagaaagctgtttatttattcactgtaagtttattttttctacacagtaaaaacttgtactatgttaataacttgtcctatgtcaatttgtatatcatgaaacacttctcatcatattgtatgtaagtaattgcatttctgctcttccaaagctcctgcgtctgtttttaaagagcatggaaaaatactgcctagaaaatgcaaaatgaaataagagagagtagtttttcagctagtttgaaggaggacggttaacttgtatattccaccattcacatttgatgtacatgtgtagggaaagttaaaagtgttgattacataatcaaagctacctgtggtgatgttgccacctgttaaaatgtacactggatatgttgttaaacacgtgtctataatggaaacatttacaataaatattctgcatggaaatactgttaaaaaaaaaaa

SEQ ID NO: 177 - protein, 241 aa, Homo sapiens
MSEVPVARVWLVLLLLTVQVGVTAGAPWQCAPCSAEKLALCPPVSASCSEVTRSAGCGCCPMCALPLGAACGVATARCARGLSCRALPGEQQPLHALTRGQGACVQESDASAPHAAEAGSPESPESTEITEEELLDNFHLMAPSEEDHSILWDAISTYDGSKALHVTNINKAQETSGEEISKFYLPNCNKNGFYHSRQCETSMDGEAGLCWCVYPWNGKRIPGSPEIRGDPNCQIYFNVQN

SEQ ID NO: 178 - DNA, 2859 bp, Homo sapiens
  CDS (30)..(1535)
ctttccgcggcattctttgggcgtgagtcatgcaggtttgcagccagccccaaagggggtgtgtgcgcgagcagagcgctataaatacggcgcctcccagtgcccacaacgcggcgtcgccaggaggagcgcgcgggcacagggtgccgctgaccgaggcgtgcaaagactccagaattggaggcatgatgaagactctgctgctgtttgtggggctgctgctgacctgggagagtgggcaggtcctgggggaccagacggtctcagacaatgagctccaggaaatgtccaatcagggaagtaagtacgtcaataaggaaattcaaaatgctgtcaacggggtgaaacagataaagactctcatagaaaaaacaaacgaagagcgcaagacactgctcagcaacctagaagaagccaagaagaagaaagaggatgccctaaatgagaccagggaatcagagacaaagctgaaggagctcccaggagtgtgcaatgagaccatgatggccctctgggaagagtgtaagccctgcctgaaacagacctgcatgaagttctacgcacgcgtctgcagaagtggctcaggcctggttggccgccagcttgaggagttcctgaaccagagctcgcccttctacttctggatgaatggtgaccgcatcgactccctgctggagaacgaccggcagcagacgcacatgctggatgtcatgcaggaccacttcagccgcgcgtccagcatcatagacgagctcttccaggacaggttcttcacccgggagccccaggatacctaccactacctgcccttcagcctgccccaccggaggcctcacttcttctttcccaagtcccgcatcgtccgcagcttgatgcccttctctccgtacgagcccctgaacttccacgccatgttccagcccttccttgagatgatacacgaggctcagcaggccatggacatccacttccatagcccggccttccagcacccgccaacagaattcatacgagaaggcgacgatgaccggactgtgtgccgggagatccgccacaactccacgggctgcctgcggatgaaggaccagtgtgacaagtgccgggagatcttgtctgtggactgttccaccaacaacccctcccaggctaagctgcggcgggagctcgacgaatccctccaggtcgctgagaggttgaccaggaaatacaacgagctgctaaagtcctaccagtggaagatgctcaacacctcctccttgctggagcagctgaacgagcagtttaactgggtgtcccggctggcaaacctcacgcaaggcgaagaccagtactatctgcgggtcaccacggtggcttcccacacttctgactcggacgttccttccggtgtcactgaggtggtcgtgaagctctttgactctgatcccatcactgtgacggtccctgtagaagtctccaggaagaaccctaaatttatggagaccgtggcggagaaagcgctgcaggaataccgcaaaaagcaccgggaggagtgagatgtggatgttgcttttgcacctacgggggcatctgagtccagctccccccaagatgagctgcagccccccagagagagctctgcacgtcaccaagtaaccaggccccagcctccaggcccccaactccgcccagcctctccccgctctggatcctgcactctaacactcgactctgctgctcatgggaagaacagaattgctcctgcatgcaactaattcaataaaactgtcttgtgagctgatcgcttggagggtcctctttttatgttgagttgctgcttcccggcatgccttcattttgctatggggggcaggcaggggggatggaaaataagtagaaacaaaaaagcagtggctaagatggtatagggactgtcataccagtgaagaataaaagggtgaagaataaaagggatatgatgacaaggttgatccacttcaagaattgcttgctttcaggaagagagatgtgtttcaacaagccaactaaaatatattgctgcaaatggaagcttttctgttctattataaaactgtcgatgtattctgaccaaggtgcgacaatctcctaaaggaatacactgaaagttaaggagaagaatcagtaagtgtaaggtgtacttggtattataatgcataattgatgttttcgttatgaaaacatttggtgcccagaagtccaaattatcagttttatttgtaagagctattgcttttgcagcggttttatttgtaaaagctgttgatttcgagttgtaagagctcagcatcccaggggcatcttcttgactgtggcatttcctgtccaccgccggtttatatgatcttcatacctttccctggaccacaggcgtttctcggcttttagtctgaaccatagctgggctgcagtaccctacgctgccagcaggtggccatgactacccgtggtaccaatctcagtcttaaagctcaggcttttcgttcattaacattctctgatagaattctggtcatcagatgtactgcaatggaacaaaactcatctggctgcatcccaggtgtgtagcaaagtccacatgtaaatttatagcttagaatattcttaagtcactgtcccttgtctctctttgaagttataaacaacaaacttaaagcttagcttatgtccaaggtaagtattttagcatggctgtcaaggaaattcagagtaaagtcagtgtgattcacttaatgatatacattaattagaattatggggtcagaggtatttgcttaagtgatcataattgtaaagtatatgtcacattgtcacattaatgtcaaaaaaaaaaaaaaaaaa

SEQ ID NO: 179 - protein, 501 aa, Homo sapiens
MQVCSQPQRGCVREQSAINTAPPSAHNAASPGGARGHRVPLTEACKDSRIGGMMKTLLLFVGLLLTWESGQVLGDQTVSDNELQEMSNQGSKYVNKEIQNAVNGVKQIKTLIEKTNEERKTLLSNLEEAKKKKEDALNETRESETKLKELPGVCNETMMALWEECKPCLKQTCMKFYARVCRSGSGLVGRQLEEFLNQSSPFYFWMNGDRIDSLLENDRQQTHMLDVMQDHFSRASSIIDELFQDRFFTREPQDTYHYLPFSLPHRRPHFFFPKSRIVRSLMPFSPYEPLNFHAMFQPFLEMIHEAQQAMDIHFHSPAFQHPPTEFIREGDDDRTVCREIRHNSTGCLRMKDQCDKCREILSVDCSTNNPSQAKLRRELDESLQVAERLTRKYNELLKSYQWKMLNTSSLLEQLNEQFNWVSRLANLTQGEDQYYLRVTTVASHTSDSDVPSGVTEVVVKLFDSDPITVTVPVEVSRKNPKFMETVAEKALQEYRKKHREE

SEQ ID NO: 180 - DNA, 2979 bp, Homo sapiens
  CDS (306)..(1655)
gggcagcctgctgtcggcttagaggggatgggcagtgtggagggcctggcagagcaagaggactcatccttccaaagggactttctctgggaagcctgctcctcgggccactgcgaaccctctctactctccgaagggaattgtccttcctggcttccactacttccacccctgaatgcacaggcagcccggcccaagtctcccactagggatgcagatggattcggtgtgaagggctggctgctgttgcctccggctcttgaaagtcaagttcagaggcgtgcaaagactccagaattggaggcatgatgaagactctgctgctgtttgtggggctgctgctgacctgggagagtgggcaggtcctgggggaccagacggtctcagacaatgagctccaggaaatgtccaatcagggaagtaagtacgtcaataaggaaattcaaaatgctgtcaacggggtgaaacagataaagactctcatagaaaaaacaaacgaagagcgcaagacactgctcagcaacctagaagaagccaagaagaagaaagaggatgccctaaatgagaccagggaatcagagacaaagctgaaggagctcccaggagtgtgcaatgagaccatgatggccctctgggaagagtgtaagccctgcctgaaacagacctgcatgaagttctacgcacgcgtctgcagaagtggctcaggcctggttggccgccagcttgaggagttcctgaaccagagctcgcccttctacttctggatgaatggtgaccgcatcgactccctgctggagaacgaccggcagcagacgcacatgctggatgtcatgcaggaccacttcagccgcgcgtccagcatcatagacgagctcttccaggacaggttcttcacccgggagccccaggatacctaccactacctgcccttcagcctgccccaccggaggcctcacttcttctttcccaagtcccgcatcgtccgcagcttgatgcccttctctccgtacgagcccctgaacttccacgccatgttccagcccttccttgagatgatacacgaggctcagcaggccatggacatccacttccatagcccggccttccagcacccgccaacagaattcatacgagaaggcgacgatgaccggactgtgtgccgggagatccgccacaactccacgggctgcctgcggatgaaggaccagtgtgacaagtgccgggagatcttgtctgtggactgttccaccaacaacccctcccaggctaagctgcggcgggagctcgacgaatccctccaggtcgctgagaggttgaccaggaaatacaacgagctgctaaagtcctaccagtggaagatgctcaacacctcctccttgctggagcagctgaacgagcagtttaactgggtgtcccggctggcaaacctcacgcaaggcgaagaccagtactatctgcgggtcaccacggtggcttcccacacttctgactcggacgttccttccggtgtcactgaggtggtcgtgaagctctttgactctgatcccatcactgtgacggtccctgtagaagtctccaggaagaaccctaaatttatggagaccgtggcggagaaagcgctgcaggaataccgcaaaaagcaccgggaggagtgagatgtggatgttgcttttgcacctacgggggcatctgagtccagctccccccaagatgagctgcagccccccagagagagctctgcacgtcaccaagtaaccaggccccagcctccaggcccccaactccgcccagcctctccccgctctggatcctgcactctaacactcgactctgctgctcatgggaagaacagaattgctcctgcatgcaactaattcaataaaactgtcttgtgagctgatcgcttggagggtcctctttttatgttgagttgctgcttcccggcatgccttcattttgctatggggggcaggcaggggggatggaaaataagtagaaacaaaaaagcagtggctaagatggtatagggactgtcataccagtgaagaataaaagggtgaagaataaaagggatatgatgacaaggttgatccacttcaagaattgcttgctttcaggaagagagatgtgtttcaacaagccaactaaaatatattgctgcaaatggaagcttttctgttctattataaaactgtcgatgtattctgaccaaggtgcgacaatctcctaaaggaatacactgaaagttaaggagaagaatcagtaagtgtaaggtgtacttggtattataatgcataattgatgttttcgttatgaaaacatttggtgcccagaagtccaaattatcagttttatttgtaagagctattgcttttgcagcggttttatttgtaaaagctgttgatttcgagttgtaagagctcagcatcccaggggcatcttcttgactgtggcatttcctgtccaccgccggtttatatgatcttcatacctttccctggaccacaggcgtttctcggcttttagtctgaaccatagctgggctgcagtaccctacgctgccagcaggtggccatgactacccgtggtaccaatctcagtcttaaagctcaggcttttcgttcattaacattctctgatagaattctggtcatcagatgtactgcaatggaacaaaactcatctggctgcatcccaggtgtgtagcaaagtccacatgtaaatttatagcttagaatattcttaagtcactgtcccttgtctctctttgaagttataaacaacaaacttaaagcttagcttatgtccaaggtaagtattttagcatggctgtcaaggaaattcagagtaaagtcagtgtgattcacttaatgatatacattaattagaattatggggtcagaggtatttgcttaagtgatcataattgtaaagtatatgtcacattgtcacattaatgtcaaaaaaaaaaaaaaaaaa

SEQ ID NO: 181 - protein, 449 aa, Homo sapiens
MMKTLLLFVGLLLTWESGQVLGDQTVSDNELQEMSNQGSKYVNKEIQNAVNGVKQIKTLIEKTNEERKTLLSNLEEAKKKKEDALNETRESETKLKELPGVCNETMMALWEECKPCLKQTCMKFYARVCRSGSGLVGRQLEEFLNQSSPFYFWMNGDRIDSLLENDRQQTHMLDVMQDHFSRASSIIDELFQDRFFTREPQDTYHYLPFSLPHRRPHFFFPKSRIVRSLMPFSPYEPLNFHAMFQPFLEMIHEAQQAMDIHFHSPAFQHPPTEFIREGDDDRTVCREIRHNSTGCLRMKDQCDKCREILSVDCSTNNPSQAKLRRELDESLQVAERLTRKYNELLKSYQWKMLNTSSLLEQLNEQFNWVSRLANLTQGEDQYYLRVTTVASHTSDSDVPSGVTEVVVKLFDSDPITVTVPVEVSRKNPKFMETVAEKALQEYRKKHREE

SEQ ID NO: 182 - DNA, 955 bp, Homo sapiens
  CDS (67)..(810)
ccaagagctaaaagagagtaagggggaaacaacagcagctccaaccagggcagccttcctgagaagatgcaaccaatcctgcttctgctggccttcctcctgctgcccagggcagatgcaggggagatcatcgggggacatgaggccaagccccactcccgcccctacatggcttatcttatgatctgggatcagaagtctctgaagaggtgcggtggcttcctgatacaagacgacttcgtgctgacagctgctcactgttggggaagctccataaatgtcaccttgggggcccacaatatcaaagaacaggagccgacccagcagtttatccctgtgaaaagacccatcccccatccagcctataatcctaagaacttctccaacgacatcatgctactgcagctggagagaaaggccaagcggaccagagctgtgcagcccctcaggctacctagcaacaaggcccaggtgaagccagggcagacatgcagtgtggccggctgggggcagacggcccccctgggaaaacactcacacacactacaagaggtgaagatgacagtgcaggaagatcgaaagtgcgaatctgacttacgccattattacgacagtaccattgagttgtgcgtgggggacccagagattaaaaagacttcctttaagggggactctggaggccctcttgtgtgtaacaaggtggcccagggcattgtctcctatggacgaaacaatggcatgcctccacgagcctgcaccaaagtctcaagctttgtacactggataaagaaaaccatgaaacgctactaactacaggaagcaaactaagcccccgctgtaatgaaacaccttctctggagccaagtccagatttacactgggagaggtgccagcaactgaataaatacctcttagctgagtggaaaaaaaaaaaaaaaaaaaaaaaaaaaaaaaa

SEQ ID NO: 183 - protein, 247 aa, Homo sapiens
MQPILLLLAFLLLPRADAGEIIGGHEAKPHSRPYMAYLMIWDQKSLKRCGGFLIQDDFVLTAAHCWGSSINVTLGAHNIKEQEPTQQFIPVKRPIPHPAYNPKNFSNDIMLLQLERKAKRTRAVQPLRLPSNKAQVKPGQTCSVAGWGQTAPLGKHSHTLQEVKMTVQEDRKCESDLRHYYDSTIELCVGDPEIKKTSFKGDSGGPLVCNKVAQGIVSYGRNNGMPPRACTKVSSFVHWIKKTMKRY

SEQ ID NO: 184 - DNA, 1080 bp, Homo sapiens
  CDS (152)..(904)
ggagaggactggctgggcaggggcgccgccccgcctcgggagaggcgggccgggcggggctgggagtatttgaggctcggagccaccgccccgccggcgcccgcagcacctcctcgccagcagccgtccggagccagccaacgagcggaaaatggcagacaatttttcgctccatgatgcgttatctgggtctggaaacccaaaccctcaaggatggcctggcgcatgggggaaccagcctgctggggcagggggctacccaggggcttcctatcctggggcctaccccgggcaggcacccccaggggcttatcctggacaggcacctccaggcgcctaccctggagcacctggagcttatcccggagcacctgcacctggagtctacccagggccacccagcggccctggggcctacccatcttctggacagccaagtgccaccggagcctaccctgccactggcccctatggcgcccctgctgggccactgattgtgccttataacctgcctttgcctgggggagtggtgcctcgcatgctgataacaattctgggcacggtgaagcccaatgcaaacagaattgctttagatttccaaagagggaatgatgttgccttccactttaacccacgcttcaatgagaacaacaggagagtcattgtttgcaatacaaagctggataataactggggaagggaagaaagacagtcggttttcccatttgaaagtgggaaaccattcaaaatacaagtactggttgaacctgaccacttcaaggttgcagtgaatgatgctcacttgttgcagtacaatcatcgggttaaaaaactcaatgaaatcagcaaactgggaatttctggtgacatagacctcaccagtgcttcatataccatgatataatctgaaaggggcagattaaaaaaaaaaaaagaatctaaaccttacatgtgtaaaggtttcatgttcactgtgagtgaaaatttttacattcatcaatatccctcttgtaagtcatctacttaataaatattacagtgaattacctgtctcaatatgtcaaaaaaaaaaaaaaaaaa

SEQ ID NO: 185 - protein, 250 aa, Homo sapiens [sequence omitted]

SEQ ID NO: 186 - DNA, 586 bp, Homo sapiens
  CDS (98)..(505)
agttaaaagggtgggagcgtccgggggcccatctctctcgggtggagtcttctgacagctggtgcgcctgcccgggaacatcctcctggactcaatcatggcttgtggtctggtcgccagcaacctgaatctcaaacctggagagtgccttcgagtgcgaggcgaggtggctcctgacgctaagagcttcgtgctgaacctgggcaaagacagcaacaacctgtgcctgcacttcaaccctcgcttcaacgcccacggcgacgccaacaccatcgtgtgcaacagcaaggacggcggggcctgggggaccgagcagcgggaggctgtctttcccttccagcctggaagtgttgcagaggtgtgcatcaccttcgaccaggccaacctgaccgtcaagctgccagatggatacgaattcaagttccccaaccgcctcaacctggaggccatcaactacatggcagctgacggtgacttcaagatcaaatgtgtggcctttgactgaaatcagccagcccatggcccccaataaaggcagctgcctctgctccctctgaaaaaaaaaaaaaaaaaaaaaaaaaaaaaa

SEQ ID NO: 187 - protein, 135 aa, Homo sapiens
MACGLVASNLNLKPGECLRVRGEVAPDAKSFVLNLGKDSNNLCLHFNPRFNAHGDANTIVCNSKDGGAWGTEQREAVFPFQPGSVAEVCITFDQANLTVKLPDGYEFKFPNRLNLEAINYMAADGDFKIKCVAFD

SEQ ID NO: 188 - DNA, 4919 bp, Homo sapiens
  CDS (289)..(705)
acttcgctccgcgcagccgcctggtctgcagtttgttggagctctgcgtccagcgccgctgccgctgccgccgccgccgccgccgccgccgccgccgccgccgccgccactaccaccacttgattcttgcagccaccctgcgaaccctgccacactgcgatcgcatcatcgcggtattcggttcgctgcgttcccgccgccaccgcctcggcgccctttcttggcccttgttcccccaaatgtctgactctgactctcggactgagaaacgcaagaaaaaaagaccaaatggcaaagcaaccttctgatgtaagttctgagtgtgaccgagaaggtagacaattgcagcctgcggagaggcctccccagctcagacctggggcccctacctccctacagacagagccacaagacaggagcccagcacccatgagttgtgacaaatcaacacaaaccccaagtcctccttgccaggccttcaaccactatctcagtgcaatggcttccatgaggcaggctgaacctgcagatatgcgcccagagatatggatcgcccaagagttgcggcgtattggagacgagtttaacgcttactatgcaaggagggtatttttgaataattaccaagcagccgaagaccacccacgaatggttatcttacgactgttacgttacattgtccgcctggtgtggagaatgcattgacaggttctttgcggagccgagataccatgcagacattttgcttgttcaaaccaacaagacccagcaccgcggtctcctggtgccattattatgcagccagcggttctcttgtggagggggcaggtgacgtttcagaagacaccgagctggatgggactacctttctgttcatcaccacacagcagaatttctaatggaagtttgttgtgaatgtaaaggagggagcattctttgctttttaatatacaaaccatggttttttggagcaggattttgtgtaagaatggtgtttacatgcagtgtgttttccccctcaccttcaataaggtttttcaaaaaggaaatggaaactttttaaccaatttgtgaataacttttgtattaaaattttaagaacctacggcctattctcagaggattatgtaacccctgcagtggaaactgagccagctaacttaaaaagctgccttagtttatttttagagattacagaatttttaaacagggagacgtgtgatatactccctcccttccctactattgcctctctgacctttttaaattatttttaataccaaaagagttcttttgaaatggaactgattaaaagggcagagggtctgttgccagcctgcattgatataccagtcccatttgtaaatatttacgtacctttataaattcagttgcatctgtggcaaaatttcagactatttttgcgtctttcctcatcactttttgtgatgcaactccagtctggactcagatgcatagatttggtccagtgtattttcatgataaagtgaaattgagtcagaacaagagttaatatctgcctgtatcttgcacagttcgagcgatctgttattaactgggaagcatttggtgttggttttcattccatttcgacgagcatgttattgggaagtattctgaagaggcaatagcagtaataacaacagacttaagtgctacgcccctttgtgctgctggcttttctggttgcaggctttcccatggtcacaggatgcactgtcagcatcaggtcccagagggccaccgtgtccattacagcagagtccagctgcagcatccagctcacgccctcatgggaattggcacaggcctggggcagggcttctgatggccatttgcttggcctcctgcattttagtccaactcacagtccactagcttcactcctttaaattcactttgaaacaggcctcatcccacttccaccagcaccatagaagaataattctgggcagaagtctgttttttttcatttttccaggacagttggatattgtcaggccacttgtgaccccagccatgtagtgagggtgctctttctctgtgcctgctccttatgagtgcagtggaaggaagccacacactggtcagtcatttcagaggcagcagatgcccagggagacccaagaaagagtcaggttagggagcagtgaaagtgaggagggaagacaattctgtgaactctgtaactcttaaaatttttgaaaactccatcgttaaacaacttttaaaagaaataactaaattttcaaatgagtaagcagtgccaccaactagtgttttgcccgatagaagagccagcatgttcacgttatttaaattaggtggaaaaatctaaacatttttatcttcataatttaaaaaatatatatgtatatattgcatattcactttttcctttaggtagagatgatttcaatccaaatactcttactttaaaaaatttcctttccccaagaatctccttgggactttgacttatttttaaagctgtgttggagctcatcttgttccctgatgtgtctcgagcccattggtagggtcatacaaagcccacggttacaagcagtggtaggattgcagccgtgggcctgctggacacacacatacaccaaagatgtatttggatctgggcaccccctcccaggatccctgtactcacgtgccagtctcctgactagagcactttactctgtttcctcagccctgcagcccctgggagcacacactgggtgcagccctgggccaggcacgggaggccctgccctgtgctgcccaggggctgtgtgcaccacatgagcacatttccctctggcctggcggcctccaggctggctgtggaaacagttcctgaggaaattagagattctatgaattgtaggagtattaaagaccaggctgttggcaccagaacttaaagcgatgactggatgtctctgtactgtatgtatctggttatcaagatgcctctgtgcagaaagtatgcctcccgtgggtatacgtttttaccttttttaaaaaacatttttgtagaaaaaataattaaatcccctttttggaaacttactgcaggttttgtgccttgacaacctctccctatgtgaggtttgtaaaaagtgtcctgtgacttaacacagaaacgcaataaacacacacaaaatagtttcatgagtgattcttcagatgcccttcccaactggttagttgatcaagaattttgggggtgggggttgcggagaaatcaagtttaaaattccttctgattaaaaaaatatagtggaatacaattgtctgccgtttccccttcttaatgtatatattgtgagtatttattagattcgtaggtcatattacttatcaactgagccaaatgtctgtgtgcaattgtgtttcctttaccttgtaaaattttgtacagcataaataagtaaaaaaatcactgtttttctcaactttttcaaaatcaaggattgtaaatattgtagattctttttctgtgtgatgtgtcctactgtttcataatgctgtaacttgtagaaatattgtatatttattttctgcttatttaatgtcttaatttctgaaaagtattaacatccctgtctcccactcccctgccgtcccatgaagttaactcctgagagttgtcgggggtgactggagagctcattgcagaccacgtggtcctccagggtggctctccaccttcgggtcctggtatttccagtcaagtgggtttcaattcttgggctttgccgcccttatgatgaagtgtgtgtttgatgccagtgagaaactcagtctggcaggctacaaaattctactccaagaaatacccagcaaccttctgtttgttccaaagcaactagcttatcatgcaagcaaattttgctgactccaggctttatctttaggaaaacaaaaaaaccaaagtattatcagcaggtgggaaagatttttctattgaaaatttatccctgacaactcagcgtttagaaaagaaataaaatgtgccacttccagaggtgctgcattgcagttgttcagggctagggccaggcaggacaagtgaatgggtgggacaggtggctcctgcctaaggaccacctcaggccactaaccccttgtggacaactgtgagtagctgggttttcccccacctgctgtgcaacttcctgtgctttgaggttggactaacttgtcttcaggagctaattaactgtacagccctccccacgccccacccatacggtcactgcatttggtcagcctgcttcttcaggtcgatgccctccttctgatactccatctccttcaggggaggttggggccccactggactgggtgtcaagatgtgaaagcttatgggagctttaaggagacttcatggtggttccatgcaggtggttctgccatccctgctgatttagcctggtgcctgtgtgtgtccactcacgtacacgtggggtgggggaaacgtgtctacagatgacgctaaatcagttggggtctactctaaacagcattgtgtgtaagaagcatcctcaagctcccagttaagtaacttgactacttttatttgggaatttcagactatagaagctctcttatgttttatgtccagattctgtgaccactagttactgtatcagaactcatcaggtacccacttataaatagcactgatctggctgtatactgatccatcactaacctgttttctaggacccagcgtatgtagcatttgtattgcagtttccctggcttacttgtgttttgcactgatgaattttgacagggtaattgccactttacttgtgcaatactgctgtaaataactgcagatttttaaacaatcttttatgttaattttataaaaataaaactttcaactagtt

SEQ ID NO: 189 - protein, 138 aa, Homo sapiens
MAKQPSDVSSECDREGRQLQPAERPPQLRPGAPTSLQTEPQDRSPAPMSCDKSTQTPSPPCQAFNHYLSAMASMRQAEPADMRPEIWIAQELRRIGDEFNAYYARRVFLNNYQAAEDHPRMVILRLLRYIVRLVWRMH

SEQ ID NO: 190 - DNA, 1909 bp, Homo sapiens
  CDS (158)..(1003)
gaggtgtttcccttagctatggaaactctataagagagatccagcttgcctcctcttgagcagtcagcaacagggtcccgtccttgacacctcagcctctacaggactgagaagaagtaaaaccgtttgctggggctggcctgactcaccagctgccatgcagcagcccttcaattacccatatccccagatctactgggtggacagcagtgccagctctccctgggcccctccaggcacagttcttccctgtccaacctctgtgcccagaaggcctggtcaaaggaggccaccaccaccaccgccaccgccaccactaccacctccgccgccgccgccaccactgcctccactaccgctgccacccctgaagaagagagggaaccacagcacaggcctgtgtctccttgtgatgtttttcatggttctggttgccttggtaggattgggcctggggatgtttcagctcttccacctacagaaggagctggcagaactccgagagtctaccagccagatgcacacagcatcatctttggagaagcaaataggccaccccagtccaccccctgaaaaaaaggagctgaggaaagtggcccatttaacaggcaagtccaactcaaggtccatgcctctggaatgggaagacacctatggaattgtcctgctttctggagtgaagtataagaagggtggccttgtgatcaatgaaactgggctgtactttgtatattccaaagtatacttccggggtcaatcttgcaacaacctgcccctgagccacaaggtctacatgaggaactctaagtatccccaggatctggtgatgatggaggggaagatgatgagctactgcactactgggcagatgtgggcccgcagcagctacctgggggcagtgttcaatcttaccagtgctgatcatttatatgtcaacgtatctgagctctctctggtcaattttgaggaatctcagacgtttttcggcttatataagctctaagagaagcactttgggattctttccattatgattctttgttacaggcaccgagaatgttgtattcagtgagggtcttcttacatgcatttgaggtcaagtaagaagacatgaaccaagtggaccttgagaccacagggttcaaaatgtctgtagctcctcaactcacctaatgtttatgagccagacaaatggaggaatatgacggaagaacatagaactctgggctgccatgtgaagagggagaagcatgaaaaagcagctaccaggtgttctacactcatcttagtgcctgagagtatttaggcagattgaaaaggacaccttttaactcacctctcaaggtgggccttgctacctcaagggggactgtctttcagatacatggttgtgacctgaggatttaagggatggaaaaggaagactagaggcttgcataataagctaaagaggctgaaagaggccaatgccccactggcagcatcttcacttctaaatgcatatcctgagccatcggtgaaactaacagataagcaagagagatgttttggggactcatttcattcctaacacagcatgtgtatttccagtgcaattgtaggggtgtgtgtgtgtgtgtgtgtgtgtgtgtgtgtatgactaaagagagaatgtagatattgtgaagtacatattaggaaaatatgggttgcatttggtcaagattttgaatgcttcctgacaatcaactctaatagtgcttaaaaatcattgattgtcagctactaatgatgttttcctataatataataaatatttatgtagatgtgcatttttgtgaaatgaaaacatgtaataaaaagtatatgttaggatacaaaaaaaaaaaaaaaaaaaaaaaaaaaaaaaaaaaaaaaaaaaaaaaaaaaa

SEQ ID NO: 191 - protein, 281 aa, Homo sapiens
MQQPFNYPYPQIYWVDSSASSPWAPPGTVLPCPTSVPRRPGQRRPPPPPPPPPLPPPPPPPPLPPLPLPPLKKRGNHSTGLCLLVMFFMVLVALVGLGLGMFQLFHLQKELAELRESTSQMHTASSLEKQIGHPSPPPEKKELRKVAHLTGKSNSRSMPLEWEDTYGIVLLSGVKYKKGGLVINETGLYFVYSKVYFRGQSCNNLPLSHKVYMRNSKYPQDLVMMEGKMMSYCTTGQMWARSSYLGAVFNLTSADHLYVNVSELSLVNFEESQTFFGLYKL

SEQ ID NO: 192 - DNA, 1355 bp, Homo sapiens
  CDS (296)..(793)
cagtggctggtaggcagtggctgggaggcagcggcccaattagtgtcgtgcggcccgtggcgaggcgaggtccggggagcgagcgagcaagcaaggcgggaggggtggccggagctgcggcggctggcacaggaggaggagcccgggcgggcgaggggcggccggagagcgccagggcctgagctgccggagcggcgcctgtgagtgagtgcagaaagcaggcgcccgcgcgctagccgtggcaggagcagcccgcacgccgcgctctctccctgggcgacctgcagtttgcaatatgactttggaggaattctcggctggagagcagaagaccgaaaggatggataaggtgggggatgccctggaggaagtgctcagcaaagccctgagtcagcgcacgatcactgtcggggtgtacgaagcggccaagctgctcaacgtcgaccccgataacgtggtgttgtgcctgctggcggcggacgaggacgacgacagagatgtggctctgcagatccacttcaccctgatccaggcgttttgctgcgagaacgacatcaacatcctgcgcgtcagcaacccgggccggctggcggagctcctgctcttggagaccgacgctggccccgcggcgagcgagggcgccgagcagcccccggacctgcactgcgtgctggtgacgaatccacattcatctcaatggaaggatcctgccttaagtcaacttatttgtttttgccgggaaagtcgctacatggatcaatgggttccagtgattaatctccctgaacggtgatggcatctgaatgaaaataactgaaccaaattgcactgaagtttttgaaatacctttgtagttactcaagcagttactccctacactgatgcaaggattacagaaactgatgccaaggggctgagtgagttcaactacatgttctgggggcccggagatagatgactttgcagatggaaagaggtgaaaatgaagaaggaagctgtgttgaaacagaaaaataagtcaaaaggaacaaaaattacaaagaaccatgcaggaaggaaaactatgtattaatttagaatggttgagttacattaaaataaaccaaatatgttaaagtttaagtgtgcagccatagtttgggtatttttggtttatatgccctcaagtaaaagaaaagccgaaagggttaatcatatttgaaaaccatattttattgtattttgatgagatattaaattctcaaagttttattataaattctactaagttattttatgacatgaaaagttatttatgctataaattttttgaaacacaatacctacaataaactggtatgaataattgcatcatt

SEQ ID NO: 193 - protein, 165 aa, Homo sapiens
MTLEEFSAGEQKTERMDKVGDALEEVLSKALSQRTITVGVYEAAKLLNVDPDNVVLCLLAADEDDDRDVALQIHFTLIQAFCCENDINILRVSNPGRLAELLLLETDAGPAASEGAEQPPDLHCVLVTNPHSSQWKDPALSQLICFCRESRYMDQWVPVINLPER

SEQ ID NO: 194 - DNA, 4853 bp, Homo sapiens
  CDS (70)..(3489)
ttcgccgtttgaattgctgcgggcccgggccctcacctcacctgaggtccggccgcccaggggtgcgctatgccgtcgggaggtgaccagtcgccaccgcccccgcctccccctccggcggcggcagcctcggatgaggaggaggaggacgacggcgaggcggaagacgccgcgccgtctgccgagtcgcccacccctcagatccagcagcggttcgacgagctgtgcagccgcctcaacatggacgaggcggcgcggcccgaggcctgggacagctaccgcagcatgagcgaaagctacacgctggagggaaatgatcttcattggttagcatgtgccttatatgtggcttgcagaaaatctgttccaactgtaagcaaagggacagtggaaggaaactatgtatctttaactagaatcctgaaatgttcagagcagagcttaatcgaattttttaataagatgaagaagtgggaagacatggcaaatctacccccacatttcagagaacgtactgagagattagaaagaaacttcactgtttctgctgtaatttttaagaaatatgaacccatttttcaggacatctttaaataccctcaagaggagcaacctcgtcagcagcgaggaaggaaacagcggcgacagccctgtactgtgtctgaaattttccatttttgttgggtgctttttatatatgcaaaaggtaatttccccatgattagtgatgatttggtcaattcttatcacctgctgctgtgtgctttggacttagtttatggaaatgcacttcagtgttctaatcgtaaagaacttgtgaaccctaattttaaaggcttatctgaagattttcatgctaaagattctaaaccttcctctgaccccccttgtatcattgagaaactgtgttccttacatgatggcctagttttggaagcaaaggggataaaggaacatttctggaaaccctatattaggaaactttatgaaaaaaagctccttaagggaaaagaagaaaatctcactgggtttctagaacctgggaactttggagagagttttaaagccatcaataaggcctatgaggagtatgttttatctgttgggaatttagatgagcggatatttcttggagaggatgctgaggaggaaattgggactctctcaaggtgtctgaacgctggttcaggaacagagactgctgaaagggtgcagatgaaaaacatcttacagcagcattttgacaagtccaaagcacttagaatctccacaccactaactggtgttaggtacattaaggagaatagcccttgtgtgactccagtttctacagctacgcatagcttgagtcgtcttcacaccatgctgacaggcctcaggaatgcaccaagtgagaaactggaacagattctcaggacatgttccagagatccaacccaggctattgctaacagactgaaagaaatgtttgaaatatattctcagcatttccagccagacgaggatttcagtaattgtgctaaagaaattgccagcaaacattttcgttttgcggagatgctttactataaagtattagaatctgttattgagcaggaacaaaaaagactaggagacatggatttatctggtattctggaacaagatgcattccacagatctctcttggcctgctgccttgaggtcgtcactttttcttataagcctcctgggaattttccatttattactgaaatatttgatgtgcctctttatcatttttataaggtgatagaagtattcattagagcagaagatggcctttgtagagaggtggtaaaacaccttaatcagattgaagaacagatcttagatcatttggcatggaaaccagagtctccactctgggaaaaaattagagacaatgaaaacagagttcctacatgtgaagaggtcatgccacctcagaacctggaaagggcagatgaaatttgcattgctggctcccctttgactcccagaagggtgactgaagttcgtgctgatactggaggacttggaaggagcataacatctccaaccacattatacgataggtacagctccccaccagccagcactaccagaaggcggctatttgttgagaatgatagcccctctgatggagggacgcctgggcgcatgcccccacagcccctagtcaatgctgtccctgtgcagaatgtatctggggagactgtttctgtcacaccagttcctggacagactttggtcaccatggcaaccgccactgtcacagccaacaatgggcaaacggtaaccattcctgtgcaaggtattgccaatgaaaatggagggataacattcttccctgtccaagtcaatgttggggggcaggcacaagctgtgacaggctccatccagcccctcagtgctcaggccctggctggaagtctgagctctcaacaggtgacaggaacaactttgcaagtccctggtcaagtggccattcaacagatttccccaggtggccaacagcagaagcaaggccagtctgtaaccagcagtagtaatagacccaggaagaccagctctttatcgcttttctttagaaaggtataccatttagcagctgtccgccttcgggatctctgtgccaaactagatatttcagatgaattgaggaaaaaaatctggacctgctttgaattctccataattcagtgtcctgaacttatgatggacagacatctggaccagttattaatgtgtgccatttatgtgatggcaaaggtcacaaaagaagataagtccttccagaacattatgcgttgttataggactcagccgcaggcccggagccaggtgtatagaagtgttttgataaaagggaaaagaaaaagaagaaattctggcagcagtgatagcagaagccatcagaattctccaacagaactaaacaaagatagaaccagtagagactccagtccagttatgaggtcaagcagcaccttgccagttccacagcccagcagtgctcctcccacacctactcgcctcacaggtgccaacagtgacatggaagaagaggagaggggagacctcattcagttctacaacaacatctacatcaaacagattaagacatttgccatgaagtactcacaggcaaatatggatgctcctccactctctccctatccatttgtaagaacaggctcccctcgccgaatacagttgtctcaaaatcatcctgtctacatttccccacataaaaatgaaacaatgctttctcctcgagaaaagattttctattacttcagcaacagtccttcaaagagactgagagaaattaatagtatgatacgcacaggagaaactcctactaaaaagagaggaattcttttggaagatggaagtgaatcacctgcaaaaagaatttgcccagaaaatcattctgccttattacgccgtctccaagatgtagctaatgaccgtggttcccactgaggttagtctcttgtattaaactcttcacaaaatctgtttagcagcagcctttaatgcatctagattatggagcttttttccttaatccagctgatgagttacagcctgttagtaacatgaggggacattttggtgagaaatgggacttaactccttccagtgtccttagaacattttaattcatcccaactgtctttttttccctaccactcagtgattactgtcaaggctgcttacaatccaaacttgggtttttggctctggcaaagcttttagaaatactgcaagaaatgatgtgtacccaacgtgagcataggaggcttctgttgacgtctccaacagaagaactgtgtttcaagttcaatcctacctgttttgtggtcagctgtagtcctcataaaaagcaaaacaaaaattaggtattttgtcctaaaacacctggtaggagtgtgtgattttttgcattcctgacaaaggagagcacacccaggtttggaggtcctaggtcattagccctcgtctcccgttccctttgtgcacatcttccctctccccattcggtgtggtgcagtgtgaaaagtccttgattgttcgggtgtgcaatgtctgagtgaacctgtataagtggaggcactttagggctgtaaaatgcatgattttgtaacccagattttgctgtatatttgtgatagcactttctacaatgtgaactttattaaatacaaaacttccaggctaaacatccaatattttctttaatgcttttatatttttttaaaatgttaaaacccctatagccaccttttgggaatgttttaaattctccagttttttgttatatagggatcaaccagctaagaaaagattttaagtcaagttgaattgaggggattaatatgaaaacttatgacctcttcctttaggagggagttatctaaaagaaatgtctattaaggtgatatatttaaaaatatttttgggtgttcctggcagtttaaaaaaattggttggagaatttaggtttttattagtaccatagtaccatttatacaaattagaaaatgttatttaacagctgaattatctatacatatctttattaatcactattgttccagcagttttcaagtcaaattaataatcttattagggagaaaattcaattgtaaattgaatcagtataaacaaagttactaggtaacttcatattgctgagagaaatatggaacttacattgttcaattagaatagtgttctccccaaatatttataaaacttctcaagatactgctacgtgtaattttatatgaagataagtgtatttttcaataaagcatttataaattaaaaaaaaaaaaaaaaaa

SEQ ID NO: 195 - protein, 1139 aa, Homo sapiens
MPSGGDQSPPPPPPPPAAAASDEEEEDDGEAEDAAPSAESPTPQIQQRFDELCSRLNMDEAARPEAWDSYRSMSESYTLEGNDLHWLACALYVACRKSVPTVSKGTVEGNYVSLTRILKCSEQSLIEFFNKMKKWEDMANLPPHFRERTERLERNFTVSAVIFKKYEPIFQDIFKYPQEEQPRQQRGRKQRRQPCTVSEIFHFCWVLFIYAKGNFPMISDDLVNSYHLLLCALDLVYGNALQCSNRKELVNPNFKGLSEDFHAKDSKPSSDPPCIIEKLCSLHDGLVLEAKGIKEHFWKPYIRKLYEKKLLKGKEENLTGFLEPGNFGESFKAINKAYEEYVLSVGNLDERIFLGEDAEEEIGTLSRCLNAGSGTETAERVQMKNILQQHFDKSKALRISTPLTGVRYIKENSPCVTPVSTATHSLSRLHTMLTGLRNAPSEKLEQILRTCSRDPTQAIANRLKEMFEIYSQHFQPDEDFSNCAKEIASKHFRFAEMLYYKVLESVIEQEQKRLGDMDLSGILEQDAFHRSLLACCLEVVTFSYKPPGNFPFITEIFDVPLYHFYKVIEVFIRAEDGLCREVVKHLNQIEEQILDHLAWKPESPLWEKIRDNENRVPTCEEVMPPQNLERADEICIAGSPLTPRRVTEVRADTGGLGRSITSPTTLYDRYSSPPASTTRRRLFVENDSPSDGGTPGRMPPQPLVNAVPVQNVSGETVSVTPVPGQTLVTMATATVTANNGQTVTIPVQGIANENGGITFFPVQVNVGGQAQAVTGSIQPLSAQALAGSLSSQQVTGTTLQVPGQVAIQQISPGGQQQKQGQSVTSSSNRPRKTSSLSLFFRKVYHLAAVRLRDLCAKLDISDELRKKIWTCFEFSIIQCPELMMDRHLDQLLMCAIYVMAKVTKEDKSFQNIMRCYRTQPQARSQVYRSVLIKGKRKRRNSGSSDSRSHQNSPTELNKDRTSRDSSPVMRSSSTLPVPQPSSAPPTPTRLTGANSDMEEEERGDLIQFYNNIYIKQIKTFAMKYSQANMDAPPLSPYPFVRTGSPRRIQLSQNHPVYISPHKNETMLSPREKIFYYFSNSPSKRLREINSMIRTGETPTKKRGILLEDGSESPAKRICPENHSALLRRLQDVANDRGSH

SEQ ID NO: 196 - DNA, 2422 bp, Homo sapiens
  CDS (466)..(1062)
gtcagcctcccttccaccgccatattgggccactaaaaaaagggggctcgtcttttcggggtgtttttctccccctcccctgtccccgcttgctcacggctctgcgactccgacgccggcaaggtttggagagcggctgggttcgcgggacccgcgggcttgcacccgcccagactcggacgggctttgccaccctctccgcttgcctggtcccctctcctctccgccctcccgctcgccagtccatttgatcagcggagactcggcggccgggccggggcttccccgcagcccctgcgcgctcctagagctcgggccgtggctcgtcggggtctgtgtcttttggctccgagggcagtcgctgggcttccgagaggggttcgggccgcgtaggggcgctttgttttgttcggttttgtttttttgagagtgcgagagaggcggtcgtgcagacccgggagaaagatgtcaaacgtgcgagtgtctaacgggagccctagcctggagcggatggacgccaggcaggcggagcaccccaagccctcggcctgcaggaacctcttcggcccggtggaccacgaagagttaacccgggacttggagaagcactgcagagacatggaagaggcgagccagcgcaagtggaatttcgattttcagaatcacaaacccctagagggcaagtacgagtggcaagaggtggagaagggcagcttgcccgagttctactacagacccccgcggccccccaaaggtgcctgcaaggtgccggcgcaggagagccaggatgtcagcgggagccgcccggcggcgcctttaattggggctccggctaactctgaggacacgcatttggtggacccaaagactgatccgtcggacagccagacggggttagcggagcaatgcgcaggaataaggaagcgacctgcaaccgacgattcttctactcaaaacaaaagagccaacagaacagaagaaaatgtttcagacggttccccaaatgccggttctgtggagcagacgcccaagaagcctggcctcagaagacgtcaaacgtaaacagctcgaattaagaatatgtttccttgtttatcagatacatcactgcttgatgaagcaaggaagatatacatgaaaattttaaaaatacatatcgctgacttcatggaatggacatcctgtataagcactgaaaaacaacaacacaataacactaaaattttaggcactcttaaatgatctgcctctaaaagcgttggatgtagcattatgcaattaggtttttccttatttgcttcattgtactacctgtgtatatagtttttaccttttatgtagcacataaactttggggaagggagggcagggtggggctgaggaactgacgtggagcggggtatgaagagcttgctttgatttacagcaagtagataaatatttgacttgcatgaagagaagcaattttggggaagggtttgaattgttttctttaaagatgtaatgtccctttcagagacagctgatacttcatttaaaaaaatcacaaaaatttgaacactggctaaagataattgctatttatttttacaagaagtttattctcatttgggagatctggtgatctcccaagctatctaaagtttgttagatagctgcatgtggcttttttaaaaaagcaacagaaacctatcctcactgccctccccagtctctcttaaagttggaatttaccagttaattactcagcagaatggtgatcactccaggtagtttggggcaaaaatccgaggtgcttgggagttttgaatgttaagaattgaccatctgcttttattaaatttgttgacaaaattttctcattttcttttcacttcgggctgtgtaaacacagtcaaaataattctaaatccctcgatatttttaaagatctgtaagtaacttcacattaaaaaatgaaatattttttaatttaaagcttactctgtccatttatccacaggaaagtgttatttttaaaggaaggttcatgtagagaaaagcacacttgtaggataagtgaaatggatactacatctttaaacagtatttcattgcctgtgtatggaaaaaccatttgaagtgtacctgtgtacataactctgtaaaaacactgaaaaattatactaacttatttatgttaaaagattttttttaatctagacaatatacaagccaaagtggcatgttttgtgcatttgtaaatgctgtgttgggtagaataggttttcccctcttttgttaaataatatggctatgcttaaaaggttgcatactgagccaagtataattttttgtaatgtgtgaaaaagatgccaattattgttacacattaagtaatcaataaagaaaacttccatagctaaaaaaaaaaaaaaaaaaa

SEQ ID NO: 197 - protein, 198 aa, Homo sapiens
MSNVRVSNGSPSLERMDARQAEHPKPSACRNLFGPVDHEELTRDLEKHCRDMEEASQRKWNFDFQNHKPLEGKYEWQEVEKGSLPEFYYRPPRPPKGACKVPAQESQDVSGSRPAAPLIGAPANSEDTHLVDPKTDPSDSQTGLAEQCAGIRKRPATDDSSTQNKRANRTEENVSDGSPNAGSVEQTPKKPGLRRRQT

SEQ ID NO: 198 - DNA, 1655 bp, Homo sapiens
  CDS (85)..(1152)
gcccgcccgcgccccgaccagcccggcctcgggcagccactcaccggtgtccccgtccgcgtccttcctccccgggtcccggccatggcgctgagtgaacccatcctgccgtccttctccactttcgccagcccgtgccgcgagcgcggcctgcaggagcgctggccgcgcgccgaacccgagtccggcggcaccgacgacgacctcaacagcgtgctggacttcatcctgtccatggggctggatggcctgggcgccgaggccgccccggagccgccgccgccgcccccgccgcctgcgttctattaccccgaacccggcgcgcccccgccctacagcgcccccgcgggtggcctggtgtctgagctgctgcgacccgagctggatgcgccgctggggcccgcactgcacggccgctttctgctggcgccgcccggccgcctggtcaaggccgagccccctgaagcggacggcggcggcggctacggctgcgcccccgggctgacccgtggaccgcgcggcctcaagcgcgagggcgccccgggcccggcggcttcgtgcatgcgaggtcccgggggccgccccccgccgccgcccgacacaccgccgctcagccccgacggccccgcgcgcctgcccgcgcccggtccgcgcgcctccttcccgccgcctttcggtggccctggtttcggcgcgcccgggcccggcctgcattacgcgccgcctgcgcccccagccttcggtctcttcgacgacgcggccgccgccgcggcagccctgggcctggcgccccccgccgcccgcggtctcctcacgccgcctgcgtccccgctggagctgctggaggccaagccaaagcgcggccgccgctcttggccccgcaaacgcaccgccactcacacctgcagctacgcgggctgcggcaagacctacaccaagagttcgcatctgaaggcgcatctgcgcacgcacacaggtgagaagccctaccactgcaactgggacggctgcggctggaagtttgcgcgctcagacgagctcacgcgccactaccgaaagcacacgggccaccggccattccagtgccatctgtgcgatcgtgccttctcgcgctccgatcacctggcgctgcacatgaaacggcacatgtagccgggacgcccccgcccacctgcgcgcggccgtggcgggtcccacgcgccgggcgcggccccctcccaaactgtgactggtatttattggacccagagaaccgggccgggcacagcgtggctacagagggtctccctcgatgacgacgacgacgacgccaccaccccagcccccgtctgtgactgaaggcccggtgggaaaagaccacgatcctccttgacgagttttgtttttcaaaatggtgcaataatttaagtggcatcttctctcccaccgggtctacactagaggatcgaggcttgtgatgccttgtgagaaataagggccttaatttgtactgtctgcggcattttttataatattgtatatagtgactgacaaatattgtattactgtacatagagagacaggtgggcatttttgggctacctggttcgtttttataagattttgctgggttggttttttttttaattaaaaagttttgcatcttttaaaaaaaa

SEQ ID NO: 199 - protein, 355 aa, Homo sapiens
MALSEPILPSFSTFASPCRERGLQERWPRAEPESGGTDDDLNSVLDFILSMGLDGLGAEAAPEPPPPPPPPAFYYPEPGAPPPYSAPAGGLVSELLRPELDAPLGPALHGRFLLAPPGRLVKAEPPEADGGGGYGCAPGLTRGPRGLKREGAPGPAASCMRGPGGRPPPPPDTPPLSPDGPARLPAPGPRASFPPPFGGPGFGAPGPGLHYAPPAPPAFGLFDDAAAAAAALGLAPPAARGLLTPPASPLELLEAKPKRGRRSWPRKRTATHTCSYAGCGKTYTKSSHLKAHLRTHTGEKPYHCNWDGCGWKFARSDELTRHYRKHTGHRPFQCHLCDRAFSRSDHLALHMKRHM

SEQ ID NO: 200 - DNA, 2842 bp, Homo sapiens
  CDS (481)..(1626)
gagacgctcgctgtttgtatccattgaggagctgcctcgcgcagggggtgtgcgaggctgagtccaagagatagcaaatcgagtcttaaataatccggggagaaagacgcccgggtagatttgaggtgcagccttggagggagggattagaagccgctagactttttttcctcccctctcagtagcacggagtccgaattaattggatttcattcactggggaggaacaaaaactatctgggcagcttcattgagagagattcattgacactaagagccagcggctgcagctgggtgcagagagaacctccggctttacttctgtctcgtctgccccaaccgctagcctcggcttgggtaaggcgaggcggaattaaaccccgctccgagagcggcagcttcgcgcgcggtgcgctcggcctatgcctgccccgaggggcgtctggtaggcaccccgccctctcccgcagctcgacccccatgatagatacgctcagacccgtgcccttcgcgtcggaaatggcgatcagcaagacggtggcgtggctcaacgagcagctggagctgggcaacgagcggctgctgctgatggactgccggccgcaggagctatacgagtcgtcgcacatcgagtcggccatcaacgtggccatcccgggcatcatgctgcggcgcctgcagaagggtaacctgccggtgcgcgcgctcttcacgcgcggcgaggaccgggaccgcttcacccggcgctgtggcaccgacacagtggtgctctacgacgagagcagcagcgactggaacgagaatacgggcggcgagtcggtgctcgggctgctgctcaagaagctcaaggacgagggctgccgggcgttctacctggaaggtggcttcagtaagttccaagccgagttctccctgcattgcgagaccaatctagacggctcgtgtagcagcagctcgccgccgttgccagtgctggggctcgggggcctgcggatcagctctgactcttcctcggacatcgagtctgaccttgaccgagaccccaatagtgcaacagactcggatggtagtccgctgtccaacagccagccttccttcccagtggagatcttgcccttcctctacttgggctgtgccaaagactccaccaacttggacgtgttggaggaattcggcatcaagtacatcttgaacgtcacccccaatttgccgaatctctttgagaacgcaggagagtttaaatacaagcaaatccccatctcggatcactggagccaaaacctgtcccagtttttccctgaggccatttctttcatagatgaagcccggggcaagaactgtggtgtcttggtacattgcttggctggcattagccgctcagtcactgtgactgtggcttaccttatgcagaagctcaatctgtcgatgaacgatgcctatgacattgtcaaaatgaaaaaatccaacatatcccctaacttcaacttcatgggtcagctgctggacttcgagaggacgctgggactcagcagcccatgtgacaacagggttccagcacagcagctgtattttaccaccccttccaaccagaatgtataccaggtggactctctgcaatctacgtgaaagaccccacacccctccttgctggaatgtgtctggcccttcagcagtttctcttggcagcatcagctgggctgctttctttgtgtgtggccccaggtgtcaaaatgacaccagctgtctgtactagacaaggttaccaagtgcggaattggttaatactaacagagagatttgctccattctctttggaataacaggacatgctgtatagatacaggcagtaggtttgctctgtacccatgtgtacagcctacccatgcagggactgggattcgaggacttccaggcgcatagggtagaaccaaatgatagggtaggagcatgtgttctttagggccttgtaaggctgtttccttttgcatctggaactgactatataattgtcttcaatgaagactaattcaattttgcatatagaggagccaaagagagatttcagctctgtatttgtggtatcagtttggaaaaaaaaatctgatactccatttgattattgtaaatatttgatcttgaatcacttgacagtgtttgtttgaattgtgtttgttttttcctttgatgggcttaaaagaaattatccaaagggagaaagagcagtatgccacttcttaaaacagaacaaaacaaaaaaagaaaattgtgctcttttctaatccaaagggtatatttgcagcatgcttgactttaccaattctgatgacatctttacggacactattatcactaagaccttgttatggcgaagtctttagtctttttcatgtattttcctcatgattttttctctttatgtagtttgactatgccttacctttgtaaatatttttgcttgtgttgtcgcaaaggggataatctgggaaagacaccaaatcatgggctcactttaaaaaaagaaagaataaaaaaaccttcagctgtgctaaacagtatattacctctgtataaaattcttcagggagtgtcacctcaaatgcaatactttgggttggtttctttcctttaaaaaaatttgtataaaactggaagtgtgtgtgtgtgagcatgggtacccatttgataagagaaatgcatttgattgtgaagaagggagagttaaattctccattatgttcgtggtgtaaagtttagagctggaatttattataagaatgtaaaaccttaaattattaataaataactattttggctattgaaaaaaaaaaaaaaaaaaaaaaaa

SEQ ID NO: 201 - protein, 381 aa, Homo sapiens
MIDTLRPVPFASEMAISKTVAWLNEQLELGNERLLLMDCRPQELYESSHIESAINVAIPGIMLRRLQKGNLPVRALFTRGEDRDRFTRRCGTDTVVLYDESSSDWNENTGGESVLGLLLKKLKDEGCRAFYLEGGFSKFQAEFSLHCETNLDGSCSSSSPPLPVLGLGGLRISSDSSSDIESDLDRDPNSATDSDGSPLSNSQPSFPVEILPFLYLGCAKDSTNLDVLEEFGIKYILNVTPNLPNLFENAGEFKYKQIPISDHWSQNLSQFFPEAISFIDEARGKNCGVLVHCLAGISRSVTVTVAYLMQKLNLSMNDAYDIVKMKKSNISPNFNFMGQLLDFERTLGLSSPCDNRVPAQQLYFTTPSNQNVYQVDSLQST

1. A method of identifying an agent capable of (a) inducing the level of memory T cells, (b) promoting the survival of memory T cells, or (c) both (a) and (b), comprising determining Foxo3a phosphorylation in the presence versus the absence of a test agent, wherein a higher level of phosphorylated Foxo3a in the presence of the agent is indicative that the agent is capable of (a) inducing the level of memory T cells, (b) promoting the survival of memory T cells, or (c) both (a) and (b).

2. The method according to claim 1, wherein said phosphorylation is at a Foxo3a residue corresponding to Thr32, Ser253, Ser315, or any combination thereof.

3. The method according to claim 1, wherein said memory T cell is a central memory T cell (T_{CM}).

4. A method of identifying an agent capable of (a) inducing the level of memory T cells, (b) promoting the survival of memory T cells, or (c) both (a) and (b), comprising determining the expression of one or more nucleic acids or polypeptides comprising a sequence selected from SEQ ID NOs: 10-201 in a biological sample from an animal prior to versus after contacting the sample with a test agent, wherein a modulation of expression after contact with the agent relative to prior to contact with the agent is indicative that the agent is capable of (a) inducing the level of memory T cells, (b) promoting the survival of memory T cells, or (c) both (a) and (b).

5. The method of claim 4, wherein said memory T cells are central memory T cells, wherein said modulation is an increase and wherein said one or more nucleic acids or polypeptides comprises a sequence selected from SEQ ID NOs: 10-125 and 198-199.

6. The method of claim 4, wherein said memory T cells are effector memory T cells, wherein said modulation is an increase and wherein said one or more nucleic acids or polypeptides comprises a sequence selected from SEQ ID NOs: 126-197 and 200-201.

7. The method according to claim 4, wherein said method comprises determining the level of expression of at least 2 nucleic acids or polypeptides.

8-11. (canceled)

12. The method of claim 4, wherein said one or more nucleic acids or polypeptides comprises a sequence selected from SEQ ID NOs: 12-25, 38-39, 50-53, 62-63, 82-83, 92-95, 100-107, 110-113, 126-129, 140-151, 154-169 and 174-187.

13. The method of claim 5, wherein said one or more nucleic acids or polypeptides comprises a sequence selected from SEQ ID NOs: 12-25, 38-39, 50-53, 62-63, 82-83, 92-95, 100-107 and 110-113.

14. The method of claim 6, wherein said one or more nucleic acids or polypeptides comprises a sequence selected from SEQ ID NOs: 126-129, 140-151, 154-169 and 174-187.

15. (canceled)

16. A method of identifying an agent capable of inducing protective immunity in an animal, comprising:
(i) providing a first expression profile of one or more nucleic acids or encoding polypeptides selected from BIRC5, CALM1, CAMK2G, CaMKIINalpha, DC-UbP, FAIM2, FOXL2, GATA2, GATA3, IL-7R, IRF1, KIT, MAPK6, MAPKAPK3, RAB11B, STMN1, TNFRSF7 (CD27), CLK1 and PRKARI B in a biological sample from an animal prior to contacting the sample with a test agent;
(ii) providing a second expression profile of one or more nucleic acids encoding a polypeptide selected from BIRC5, CALM1, CAMK2G, CaMKIINalpha, DC-UbP, FAIM2, FOXL2, GATA2, GATA3, IL-7R, IRF1, KIT, MAPK6, MAPKAPK3, RAB11B, STMN1, TNFRSF7 (CD27), CLK1 and PRKARI B in a biological sample from an animal after contacting the sample with the test agent;
(iii) providing a reference expression profile associated with the expression of one or more nucleic acids encoding a polypeptide selected from BIRC5, CALM1, CAMK2G, CaMKIINalpha, DC-UbP, FAIM2, FOXL2, GATA2, GATA3, IL-7R, IRF1, KIT, MAPK6, MAPKAPK3, RAB11B, STMN1, TNFRSF7 (CD27), CLK1 and PRKARI B in a biological sample from an animal exhibiting protective immunity;
wherein increased similarity of the second expression profile to the reference expression profile, relative to the first expression profile to the reference expression profile, is indicative that the agent is capable of inducing protective immunity.

17. A method of identifying an agent capable of inducing protective immunity in an animal, comprising determining the expression of one or more nucleic acids or polypeptides selected from BIRC5, CALM 1, CAM K2G, CaMKIINalpha, DC-UbP, FAIM2, FOXL2, GATA2, GATA3, IL-7R, IRF1, KIT, MAPK6, MAPKAPK3, RAB11B, STMN1, TNFRSF7 (CD27), CLK1 and PRKARI B in a biological sample from an animal prior to versus after contacting the sample with a test agent, wherein a modulation of expression after contact with the agent relative to prior to contact with the agent is indicative that the agent is capable of inducing protective immunity.

18. The method of claim 17, wherein said modulation is an increase and wherein said one or more nucleic acids or polypeptides is selected from BIRC5, CALM1, CAMK2G, CaMKIINalpha, DC-UbP, FAIM2, FOXL2, GATA2, GATA3, IL-7R, IRF1, KIT, MAPK6, MAPKAPK3, RAB11B, STMN1 and TNFRSF7 (CD27).

19. The method of claim 17, wherein said modulation is a decrease and wherein said one or more nucleic acids or encoding polypeptides is selected from CLK1 and PRKARI B.

20. The method according to claim 17, wherein said agent is a vaccine.

21. The method according to claim 16, wherein the subject exhibiting protective immunity is a subject vaccinated with a vaccine known to confer immune protection.

22. The method according to claim 21, wherein said vaccine is Yellow Fever vaccine.

23. The method according to claim 16, wherein said method comprises providing the expression profile of at least 2 nucleic acids or polypeptides.

24-31. (canceled)

32. The method of claim 16, wherein said biological sample comprises central memory T cell (T_{CM}).

33-37. (canceled)

38. A method of inducing the survival of a memory T cell, said method comprising contacting said cell with an agent capable of phosphorylating Foxo3a.

39. A method of increasing immune function in a subject, said method comprising inducing the phosphorylation of Foxo3a in an immune cell of said subject.

40. The method of claim 39, wherein said immune function is memory T cell function.

41. The method of claim 40, wherein said memory T cell function is memory T cell survival.

42. A method of determining whether an HIV-positive subject possesses natural resistance to the development of AIDS, said method comprising:
(i) providing a first expression profile of one or more nucleic acids encoding a polypeptide selected from XIAP, GADD45, DUSP1, PTEN, SOCS1 and SOCS2 in a biological sample from said subject,
(ii) providing a reference expression profile of said one or more nucleic acids in a biological sample from a reference subject known to be an HIV-positive long term non-progressor, wherein a similarity of the first expression profile to the reference expression profile is indicative that the HIV-infected subject possesses natural resistance to the development of AIDS.

43. A collection of two or more isolated nucleic acid sequences which are substantially identical to two or more isolated respective nucleic acid sequences encoding two or more respective polypeptides selected from SEQ ID NOs: 10-201, their complements or portions thereof.

44. The collection of claim 43, comprising at least 5 isolated nucleic acid sequences encoding at least 5 polypeptides, their complements or portions thereof.

45-50. (canceled)

51. The collection of claim 43, wherein said isolated nucleic acid sequences are hybridizable array elements in a microarray.

52-67. (canceled)

68. The method of claim 17, wherein said biological sample comprises a central memory T cell (T_{CM}).
